(19) United States
(12) Patent Application Publication
(10) Pub. No.: US 2026/0055399 A1
(43) Pub. Date: Feb. 26, 2026

(54) Differential Knockout of An Allele of A Heterozygous Fibrinogen Alpha Chain (FGA) Gene

(71) Applicant: EmendoBio Inc., Wilmington, DE (US)

(72) Inventors: Lior IZHAR, Tel Aviv (IL); David BARAM, Tel Aviv (IL); Joseph GEORGESON, Rehovot (IL); Michal GOLAN-MASHIACH, Ness-Ziona (IL); Asael HERMAN, Ness-Ziona (IL); Rafi EMMANUEL, Ramla (IL)

(73) Assignee: EmendoBio Inc., Wilmington, DE (US)

(21) Appl. No.: 19/250,913

(22) Filed: Jun. 26, 2025

Related U.S. Application Data
(63) Continuation of application No. 16/767,506, now Pat. No. 12,359,196.
(60) Provisional application No. 62/591,350, filed on Nov. 28, 2017.
(60) Provisional application No. 62/651,630, filed on Apr. 2, 2018.

(51) Int. Cl. C12N 15/11; A61K 38/00; A61K 48/00; A61P 13/12; C12N 9/22; C12N 15/10; C12N 15/85; C12N 15/90

(52) U.S. Cl. CPC C12N 15/11; A61K 48/005; A61P 13/12; C12N 9/22; C12N 15/102; C12N 15/111; C12N 15/85; C12N 15/90; A61K 38/00; C12N 2310/20; C12N 2320/34; C12N 2800/80

(57) ABSTRACT

RNA molecules comprising a guide sequence portion having 17-20 nucleotides in the sequence of 17-20 contiguous nucleotides set forth in any one of SEQ ID NOs: 1-1990 and compositions, methods, and uses thereof.

[0001] This application is a continuation of U.S. patent application Ser. No. 16/767,506, which is a § 371 national stage of PCT International Application No. PCT/US2018/062871, filed Nov. 28, 2018, which claims the benefit of U.S. Provisional Application No. 62/651,630, filed Apr. 2, 2018 and U.S. Provisional Application No. 62/591,350, filed Nov. 28, 2017, the contents of each of which are hereby incorporated by reference.

[0002] Throughout this application, various publications are referenced, including referenced in parenthesis. The disclosures of all publications mentioned in this application in their entireties are hereby incorporated by reference into this application in order to provide additional description of the art to which this invention pertains and of the features in the art which can be employed with this invention.

### REFERENCE TO SEQUENCE LISTING

[0003] This application incorporates-by-reference nucleotide sequences which are present in the filed named “FGA_5798_0016US02”, which is 2,515,826 bytes in size, and which was created on Jun. 24, 2025, in the IBM-PC machine format, having an operating system compatibility with MS-Windows, which is contained in the .xml file filed Jun. 26, 2025 as part of this application.

### BACKGROUND OF INVENTION

[0004] There are several classes of DNA variation in the human genome, including insertions and deletions, differences in the copy number of repeated sequences, and single nucleotide polymorphisms (SNPs). A SNP is a DNA sequence variation occurring when a single nucleotide (adenine (A), thymine (T), cytosine (C), or guanine (G)) in the genome differs between human subjects or paired chromosomes in an individual. Over the years, the different types of DNA variations have been the focus of the research community either as markers in studies to pinpoint traits or disease causation or as potential causes of genetic disorders.

[0005] A genetic disorder is caused by one or more abnormalities in the genome. Genetic disorders may be regarded as either “dominant” or “recessive.” Recessive genetic disorders are those which require two copies (i.e., two alleles) of the abnormal/defective gene to be present. In contrast, a dominant genetic disorder involves a gene or genes which exhibit(s) dominance over a normal (functional/healthy) gene or genes. As such, in dominant genetic disorders only a single copy (i.e., allele) of an abnormal gene is required to cause or contribute to the symptoms of a particular genetic disorder. Such mutations include, for example, gain-of-function mutations in which the altered gene product possesses a new molecular function or a new pattern of gene expression. Other examples include dominant negative mutations, which have a gene product that acts antagonistically to the wild-type allele.

### Renal Amyloidosis

[0006] Amyloidosis is a protein mis-folding disorder, in which normally soluble proteins undergo conformational changes and are deposited in the extracellular space as abnormal insoluble fibrils that progressively disrupt tissue structure and function. Fibrinogen A alpha chain (also known as fibrinogen A alpha chain (FGA)) gene encodes the alpha subunit of the coagulation factor fibrinogen, which is a blood clot component, produced and secreted by liver hepatocyte cells. Mutations in FGA gene were shown to be associated with Fibrinogen A alpha chain amyloidosis (AFib) which is an autosomal dominant disease that causes hereditary renal amyloidosis.

### SUMMARY OF THE INVENTION

[0007] Disclosed is an approach for knocking out the expression of a dominant-mutated allele by disrupting the dominant-mutated allele or degrading the resulting mRNA.

[0008] The present disclosure provides a method for utilizing at least one naturally occurring nucleotide difference or polymorphism (e.g., single nucleotide polymorphism (SNP)) for distinguishing/discriminating between two alleles of a gene, one allele bearing a mutation such that it encodes a mutated protein causing a disease phenotype (“mutated allele”), and the other allele encoding for a functional protein (“functional allele”). In some embodiments, the method further comprises the step of knocking out expression of the mutated protein and allowing expression of the functional protein.

[0009] According to embodiments of the present invention, there is provided a first RNA molecule comprising a guide sequence portion having 17-20 nucleotides in the sequence of 17-20 contiguous nucleotides set forth in any one of SEQ ID NOs: 1-1990.

[0010] According to embodiments of the present invention, there is provided a first RNA molecule comprising a guide sequence portion having 17-20 contiguous nucleotides set forth in any one of SEQ ID NOs: 1-1990.

[0011] According to some embodiments of the present invention, there is provided a composition comprising an RNA molecule comprising a guide sequence portion having 17-20 nucleotides in the sequence of 17-20 contiguous nucleotides set forth in any one of SEQ ID NOs: 1-1990 and a CRISPR nuclease.

[0012] According to some embodiments of the present invention, there is provided a method for inactivating a mutant FGA allele in a cell, the method comprising delivering to the cell a composition comprising an RNA molecule comprising a guide sequence portion having 17-20 nucleotides in the sequence of 17-20 contiguous nucleotides set forth in any one of SEQ ID NOs: 1-1990 and a CRISPR nuclease.

[0013] According to some embodiments of the present invention, there is provided a method for treating AFib amyloidosis, the method comprising delivering to a subject having AFib amyloidosis a composition comprising an RNA molecule comprising a guide sequence portion having 17-20 nucleotides in the sequence of 17-20 contiguous nucleotides set forth in any one of SEQ ID NOs: 1-1990 and a CRISPR nuclease.

[0014] According to some embodiments of the present invention, there is provided use of a composition comprising an RNA molecule comprising a guide sequence portion having 17-20 nucleotides in the sequence of 17-20 contiguous nucleotides set forth in any one of SEQ ID NOs: 1-1990 and a CRISPR nuclease for inactivating a mutant FGA allele in a cell, comprising delivering to the cell the composition comprising an RNA molecule comprising a guide sequence portion having 17-20 nucleotides in the sequence of 17-20 contiguous nucleotides set forth in any one of SEQ ID NOs: 1-1990 and a CRISPR nuclease.

[0015] According to embodiments of the present invention, there is provided a medicament comprising an RNA molecule comprising a guide sequence portion having 17-20 nucleotides in the sequence of 17-20 contiguous nucleotides set forth in any one of SEQ ID NOs: 1-1990 and a CRISPR nuclease for use in inactivating a mutant FGA allele in a cell, wherein the medicament is administered by delivering to the cell the composition comprising an RNA molecule comprising a guide sequence portion having 17-20 nucleotides in the sequence of 17-20 contiguous nucleotides set forth in any one of SEQ ID NOs: 1-1990 and a CRISPR nuclease.

[0016] According to some embodiments of the present invention, there is provided use of a composition comprising an RNA molecule comprising a guide sequence portion having 17-20 nucleotides in the sequence of 17-20 contiguous nucleotides set forth in any one of SEQ ID NOs: 1-1990 and a CRISPR nuclease for treating ameliorating or preventing AFib amyloidosis, comprising delivering to a subject having or at risk of having AFib amyloidosis the composition of comprising an RNA molecule comprising a guide sequence portion having 17-20 nucleotides in the sequence of 17-20 contiguous nucleotides set forth in any one of SEQ ID NOs: 1-1990 and a CRISPR nuclease.

[0017] According to some embodiments of the present invention, there is provided a medicament comprising the composition comprising an RNA molecule comprising a guide sequence portion having 17-20 nucleotides in the sequence of 17-20 contiguous nucleotides set forth in any one of SEQ ID NOs: 1-1990 and a CRISPR nuclease for use in treating ameliorating or preventing AFib amyloidosis, wherein the medicament is administered by delivering to a subject having or at risk of having AFib amyloidosis the composition comprising an RNA molecule comprising a guide sequence portion having 17-20 nucleotides in the sequence of 17-20 contiguous nucleotides set forth in any one of SEQ ID NOs: 1-1990 and a CRISPR nuclease.

[0018] According to some embodiments of the present invention, there is provided a kit for inactivating a mutant FGA allele in a cell, comprising an RNA molecule comprising a guide sequence portion having 17-20 nucleotides in the sequence of 17-20 contiguous nucleotides set forth in any one of SEQ ID NOs: 1-1990, a CRISPR nuclease, and/or a tracrRNA molecule; and instructions for delivering the RNA molecule; CRISPR nuclease, and/or the tracrRNA to the cell.

[0019] According to some embodiments of the present invention, there is provided a kit for treating AFib amyloidosis in a subject, comprising an RNA molecule comprising a guide sequence portion having 17-20 nucleotides in the sequence of 17-20 contiguous nucleotides set forth in any one of SEQ ID NOs: 1-1990, a CRISPR nuclease, and/or a tracrRNA molecule; and instructions for delivering the RNA molecule; CRISPR nuclease, and/or the tracrRNA to a subject having or at risk of having AFib amyloidosis.

### BRIEF DESCRIPTION OF THE DRAWINGS

[0020] FIG. 1: Utilization of one RNA molecule to direct a CRISPR nuclease to a Single Nucleotide Polymorphism or Wild Type (SNP/WT) sequence located upstream to the mutation site in the mutated FGA allele and not in the functional allele to create a double-strand break (DSB) leading to formation of a frameshift mutation in an exon of the mutated FGA allele to produce a truncated fibrinogen alpha subunit lacking the FGA mutation and lacking the putative amyloid forming region suggested to effect formation of aggregates. The resultant truncated fibrinogen alpha subunit may be secreted without forming aggregates or alternatively RNA decay may be triggered resulting in knockout of the expression of the mutated allele.

[0021] FIG. 2A: Utilization of two RNA molecules to remove exon 5 of the FGA gene; FIG. 2B: Utilization of two RNA molecules to remove exon 5 and intron 1 of the FGA gene; FIG. 2C: Utilization of two RNA molecules to remove exon 5, intron 5, and exon 6; FIG. 2D Utilization of two RNA molecules to remove exon 5, intron 5, exon 6, and at least part of the 3′ untranslated region (UTR). In FIG. 2A-2D, exon 5 of the FGA gene bears an FGA mutation and encodes for the putative amyloid forming region suggested to effect formation of aggregates. Removal of, inter alia, exon 5 results in production of a fibrinogen alpha subunit that may be secreted without forming aggregates.

[0022] FIG. 3: Utilization of two RNA molecules to remove exon 3 and 4 of the FGA gene, which encode a portion of the coiled coil region essential for the assembly of fibrinogen, in order to produce a fibrinogen alpha subunit that does not assemble into a Fibrinogen hexamer secreted from the cell.

[0023] FIG. 4A: Utilization of two RNA molecules to remove exon 2, intron 2, exons 3, intron 3, and exon 4 of the FGA gene; FIG. 4B: Utilization of two RNA molecules to remove exon 1, intron 1, exon 2, intron 2, exon 3, intron 3, and exon 4 of the FGA gene. In FIG. 4A and FIG. 4B, each of exons 2, 3, and 4 encode a portion of the coiled coil region essential for the assembly of fibrinogen, necessary to produce a fibrinogen alpha subunit which may be assembled into a Fibrinogen hexamer and secreted from the cell.

[0024] FIG. 5A: Utilization of two RNA molecules to remove exon 4, intron 4, exon, 5, and intron 5 of the FGA gene; FIG. 5B: Utilization of two RNA molecules to remove exon 4, intron 4, exon 5, intron 5, and exon 6 of the FGA gene; FIG. 5C: Utilization of two RNA molecules to remove exon 4 of the FGA gene. In FIG. 5A-5C exon 4 of the FGA gene encodes a portion of the coiled coil region required for the assembly of the protein into fibrinogen required to produce a protein that assembles into a Fibrinogen hexamer secreted from the cell. In FIG. 5A and FIG. 5B, exon 5 bears the FGA mutation, removal of which results in the formation of a truncated fibrinogen alpha subunit which may be secreted without forming aggregates or alternatively RNA decay may be triggered resulting in knockout of the expression of the mutated allele.

[0025] FIG. 6A: Utilization of two RNA molecules to remove exon 1 of the FGA gene; FIG. 6B: Utilization of two RNA molecules to remove exon 1 intron 1 and exon 2 of the FGA gene; In FIG. 6A and FIG. 6B exon 1 is removed to prevent the secretion of the fibrinogen hexamer carrying an FGA gene mutation.

[0026] FIG. 7: Removing exon 2 of the FGA gene, which includes residues for binding distal domain of another fibrin gamma chain (this region is known as ‘Knob A’) and two residues (positions 47, 55) that have role in disulfide inter-chain bonding.

[0027] FIG. 8: Removing exon 3 of the FGA gene, which contains two residues with a role in disulfide inter-chain bonding (residues 64, 68).

[0028] FIG. 9: Utilization of two RNA molecules to remove a portion of exon 1, which encodes the signal peptide, exon 2, which encodes residues that produce disulfide inter-chain bonds within the Fibrinogen hexamer, and exon 3, which encodes a portion of the coiled coil region essential for the assembly of fibrinogen in order to produce a fibrinogen alpha subunit which assembles to the Fibrinogen hexamer secreted from the cell.

[0029] FIG. 10A and FIG. 10B: Two exemplary strategies are proposed to tackle the Fibrinogen amyloidosis with SpCas9 at a genomic DNA level. In FIG. 10A indels are introduced on rs6050 SNP resulting with truncated protein without the putative amyloid forming region. In FIG. 10B exclusion of the coiled-coil domain or FGA Exon 5 by knock-out is generated with two RNA molecules. One guide targets a SNP and the second guide a sequence common to both alleles. The first guide targets a SNP/SEQ in either Intron 4, Intron2, 5′UTR, or promoter region while a second guide targets a sequence in Intron 5, a common region to both transcripts.

[0030] FIG. 11A-FIG. 11D: 24 different guide sequences, identified as gFGA 1 through gFGA 24 were screened for high on target activity. FIG. 11A represents the average±standard deviation of two independent experiments. FIG. 11B, Exon 5 excision rate was tested using gFGA 12 and gFGA 22. FIG. 11C, on target activity was determined by DNA Capillary Electrophoresis. FIG. 11D, the data shows a decrease of approximately 60% in Exon 5 levels of treated cells, while no significant change was detected in Exon 6 levels. FIG. 11C and FIG. 11D represent the average±standard deviation of 4 independent experiments.

### DETAILED DESCRIPTION

### Definitions

[0031] Unless otherwise defined, all technical and/or scientific terms used herein have the same meaning as commonly understood by one of ordinary skill in the art to which the invention pertains. Although methods and materials similar or equivalent to those described herein can be used in the practice or testing of embodiments of the invention, exemplary methods and/or materials are described below. In case of conflict, the patent specification, including definitions, will control. In addition, the materials, methods, and examples are illustrative only and are not intended to be necessarily limiting.

[0032] It should be understood that the terms “a” and “an” as used above and elsewhere herein refer to “one or more” of the enumerated components. It will be clear to one of ordinary skill in the art that the use of the singular includes the plural unless specifically stated otherwise. Therefore, the terms “a,” “an” and “at least one” are used interchangeably in this application.

[0033] For purposes of better understanding the present teachings and in no way limiting the scope of the teachings, unless otherwise indicated, all numbers expressing quantities, percentages or proportions, and other numerical values used in the specification and claims, are to be understood as being modified in all instances by the term “about.” Accordingly, unless indicated to the contrary, the numerical parameters set forth in the following specification and attached claims are approximations that may vary depending upon the desired properties sought to be obtained. At the very least, each numerical parameter should at least be construed in light of the number of reported significant digits and by applying ordinary rounding techniques.

[0034] Unless otherwise stated, adjectives such as “substantially” and “about” modifying a condition or relationship characteristic of a feature or features of an embodiment of the invention, are understood to mean that the condition or characteristic is defined to within tolerances that are acceptable for operation of the embodiment for an application for which it is intended. Unless otherwise indicated, the word “or” in the specification and claims is considered to be the inclusive “or” rather than the exclusive or, and indicates at least one of, or any combination of items it conjoins.

[0035] In the description and claims of the present application, each of the verbs, “comprise,” “include” and “have” and conjugates thereof, are used to indicate that the object or objects of the verb are not necessarily a complete listing of components, elements or parts of the subject or subjects of the verb. Other terms as used herein are meant to be defined by their well-known meanings in the art.

[0036] The “guide sequence portion” of an RNA molecule refers to a nucleotide sequence that is capable of hybridizing to a specific target DNA sequence, e.g., the guide sequence portion has a nucleotide sequence which is fully complementary to said target DNA sequence. In some embodiments, the guide sequence portion is 17, 18, 19, 20, 21, 22, 23, or 24 nucleotides in length, or approximately 17-24, 18-22, 19-22, 18-20, or 17-20 nucleotides in length. The guide sequence portion may be part of an RNA molecule that can form a complex with a CRISPR nuclease with the guide sequence portion serving as the DNA targeting portion of the CRISPR complex. When the DNA molecule having the guide sequence portion is present contemporaneously with the CRISPR molecule the RNA molecule is capable of targeting the CRISPR nuclease to the specific target DNA sequence. Each possibility represents a separate embodiment. An RNA molecule can be custom designed to target any desired sequence.

[0037] In embodiments of the present invention, an RNA molecule comprises a guide sequence portion having 17-20 nucleotides in the sequence of 17-20 contiguous nucleotides set forth in any one of SEQ ID NOs: 1-1990, 1-409, or 410-1990.

[0038] As used herein, “contiguous nucleotides” set forth in a SEQ ID NO refers to nucleotides in a sequence of nucleotides in the order set forth in the SEQ ID NO without any intervening nucleotides.

[0039] In embodiments of the present invention, the guide sequence portion may be 20 nucleotides in length and consists of 20 nucleotides in the sequence of 20 contiguous nucleotides set forth in any one of SEQ ID NOs: 1-1990. In embodiments of the present invention, the guide sequence portion may be less than 20 nucleotides in length. For example, in embodiments of the present invention the guide sequence portion may be 17, 18, or 19 nucleotides in length. In such embodiments the guide sequence portion may consist of 17, 18, or 19 nucleotides, respectively, in the sequence of 17-20 contiguous nucleotides set forth in any one of SEQ ID NOs: 1-1990. For example, a guide sequence portion having 17 nucleotides in the sequence of 17 contiguous nucleotides set forth in SEQ ID NO: 1 may consist of any one of the following nucleotide sequences (nucleotides excluded from the contiguous sequence are marked in strike-through):

SEQ ID NO: 1
AUUGACUCUGCUUGGUUUUU
17 nucleotide guide sequence 1: [symbol]
GACUCUGCUUGGUUUUU
17 nucleotide guide sequence 2: [symbol]
UGACUCUGCUUGGUUUU [symbol]
17 nucleotide guide sequence 3: [symbol]
UUGACUCUGCUUGGUUU [symbol]
17 nucleotide guide sequence 4:
AUUGACUCUGCUUGGUU

[symbol]

[0040] In embodiments of the present invention, the guide sequence portion may be greater than 20 nucleotides in length. For example, in embodiments of the present invention the guide sequence portion may be 21, 22, 23, or 24 nucleotides in length. In such embodiments the guide sequence portion comprises 20 nucleotides in the sequence of 20 contiguous nucleotides set forth in any one of SEQ ID NOs: 1-1990 and additional nucleotides fully complimentary to a nucleotide or sequence of nucleotides adjacent to the 3′ end of the target sequence, 5′ end of the target sequence, or both.

[0041] In embodiments of the present invention a CRISPR nuclease and an RNA molecule comprising a guide sequence portion form a CRISPR complex that binds to a target DNA sequence to effect cleavage of the target DNA sequence. CRISPR nucleases, e.g. Cpf1, may form a CRISPR complex comprising a CRISPR nuclease and RNA molecule without a further tracrRNA molecule. Alternatively, CRISPR nucleases, e.g. Cas9, may form a CRISPR complex between the CRISPR nuclease, an RNA molecule, and a tracrRNA molecule.

[0042] In embodiments of the present invention, the RNA molecule may further comprise the sequence of a tracrRNA molecule. Such embodiments may be designed as a synthetic fusion of the guide portion of the RNA molecule and the trans-activating crRNA (tracrRNA). (See Jinek (2012) Science). Embodiments of the present invention may also form CRISPR complexes utilizing a separate tracrRNA molecule and a separate RNA molecule comprising a guide sequence portion. In such embodiments the tracrRNA molecule may hybridize with the RNA molecule via basepairing and may be advantageous in certain applications of the invention described herein.

[0043] The term “tracr mate sequence” refers to a sequence sufficiently complementary to a tracrRNA molecule so as to hybridize to the tracrRNA via basepairing and promote the formation of a CRISPR complex. (See U.S. Pat. No. 8,906,616). In embodiments of the present invention, the RNA molecule may further comprise a portion having a tracr mate sequence.

[0044] A “gene,” for the purposes of the present disclosure, includes a DNA region encoding a gene product, as well as all DNA regions which regulate the production of the gene product, whether or not such regulatory sequences are adjacent to coding and/or transcribed sequences. Accordingly, a gene includes, but is not necessarily limited to, promoter sequences, terminators, translational regulatory sequences such as ribosome binding sites and internal ribosome entry sites, enhancers, silencers, insulators, boundary elements, replication origins, matrix attachment sites and locus control regions.

[0045] “Eukaryotic” cells include, but are not limited to, fungal cells (such as yeast), plant cells, animal cells, mammalian cells and human cells.

[0046] The term “nuclease” as used herein refers to an enzyme capable of cleaving the phosphodiester bonds between the nucleotide subunits of nucleic acid. A nuclease may be isolated or derived from a natural source. The natural source may be any living organism. Alternatively, a nuclease may be a modified or a synthetic protein which retains the phosphodiester bond cleaving activity. Gene modification can be achieved using a nuclease, for example a CRISPR nuclease.

### Embodiments

[0047] The present disclosure provides a method for utilizing at least one naturally occurring nucleotide difference or polymorphism (e.g., single nucleotide polymorphism (SNP)) for distinguishing/discriminating between two alleles of a gene, one allele bearing a mutation such that it encodes a mutated protein causing a disease phenotype (“mutated allele”), and the other allele encoding for a functional protein (“functional allele”). The method further comprises the step of knocking out expression of the mutated protein and allowing expression of the functional protein. In some embodiments, the method is for treating, ameliorating, or preventing a dominant negative genetic disorder.

[0048] According to embodiments of the present invention, there is provided a first RNA molecule comprising a guide sequence portion having 17-20 nucleotides in the sequence of 17-20 contiguous nucleotides set forth in any one of SEQ ID NOs: 1-1990.

[0049] According to embodiments of the present invention, there is provided a first RNA molecule comprising a guide sequence portion having 17-20 contiguous nucleotides set forth in any one of SEQ ID NOs: 1-1990.

[0050] According embodiments of the present invention, an RNA molecule may further comprise a portion having a sequence which binds to a CRISPR nuclease.

[0051] According to embodiments of the present invention, the sequence which binds to a CRISPR nuclease is a tracrRNA sequence.

[0052] According to embodiments of the present invention, an RNA molecule may further comprise a portion having a tracr mate sequence.

[0053] According to embodiments of the present invention, an RNA molecule may further comprise one or more linker portions.

[0054] According to embodiments of the present invention, an RNA molecule may be up to 300, 290, 280, 270, 260, 250, 240, 230, 220, 210, 200, 190, 180, 170, 160, 150, 140, 130, 120, 110, or 100 nucleotides in length. Each possibility represents a separate embodiment. In embodiments of the present invention, the RNA molecule may be 17 up to 300 nucleotides in length, 100 up to 300 nucleotides in length, 150 up to 300 nucleotides in length, 200 up to 300 nucleotides in length, 100 to 200 nucleotides in length, or 150 up to 250 nucleotides in length. Each possibility represents a separate embodiment.

[0055] According to some embodiments of the present invention, there is provided a composition comprising an RNA molecule comprising a guide sequence portion having 17-20 nucleotides in the sequence of 17-20 contiguous nucleotides set forth in any one of SEQ ID NOs: 1-1990 and a CRISPR nuclease.

[0056] According to embodiments of the present invention, the composition may comprise a second RNA molecule comprising a guide sequence portion.

[0057] According to embodiments of the present invention, the guide sequence portion of the second RNA molecule comprises 17-20 nucleotides in the sequence of 17-20 contiguous nucleotides set forth in any one of SEQ ID NOs: 1-1990.

[0058] According to embodiments of the present invention, the 17-20 nucleotides of the guide sequence portion of the second RNA molecule are in a different sequence from the sequence of the guide sequence portion of the first RNA molecule

[0059] Embodiments of the present invention may comprise a tracrRNA molecule.

[0060] According to some embodiments of the present invention, there is provided a method for inactivating a mutant FGA allele in a cell, the method comprising delivering to the cell a composition comprising an RNA molecule comprising a guide sequence portion having 17-20 nucleotides in the sequence of 17-20 contiguous nucleotides set forth in any one of SEQ ID NOs: 1-1990 and a CRISPR nuclease.

[0061] According to some embodiments of the present invention, there is provided a method for treating AFib amyloidosis, the method comprising delivering to a subject having AFib amyloidosis a composition comprising an RNA molecule comprising a guide sequence portion having 17-20 nucleotides in the sequence of 17-20 contiguous nucleotides set forth in any one of SEQ ID NOs: 1-1990 and a CRISPR nuclease.

[0062] According to embodiments of the present invention, the composition comprises a second RNA molecule comprising a guide sequence portion having 17-20 nucleotides in the sequence of 17-20 contiguous nucleotides set forth in any one of SEQ ID NOs: 1-1990.

[0063] According to embodiments of the present invention, the 17-20 nucleotides of the guide sequence portion of the second RNA molecule are in a different sequence from the sequence of the guide sequence portion of the first RNA molecule

[0064] According to embodiments of the present invention, the CRISPR nuclease and the RNA molecule or RNA molecules are delivered to the subject and/or cells substantially at the same time or at different times.

[0065] According to embodiments of the present invention, the tracrRNA is delivered to the subject and/or cells substantially at the same time or at different times as the CRISPR nuclease and RNA molecule or RNA molecules.

[0066] According to embodiments of the present invention, the first RNA molecule targets a SNP or disease-causing mutation in an exon or promoter of a mutated allele, and wherein the second RNA molecule targets a SNP in the same or a different exon of the mutated allele, a SNP in an intron, or a sequence in an intron present in both the mutated or functional allele.

[0067] According to embodiments of the present invention, the first RNA molecule or the first and the second RNA molecules target a SNP in the promoter region, the start codon, or the untranslated region (UTR) of a mutated allele.

[0068] According to embodiments of the present invention, the first RNA molecule or the first and the second RNA molecules targets at least a portion of the promoter and/or the start codon and/or a portion of the UTR of a mutated allele.

[0069] According to embodiments of the present invention, the first RNA molecule targets a portion of the promoter, a first SNP in the promoter, or a SNP upstream to the promoter of a mutated allele and the second RNA molecule is targets a second SNP, which is downstream of the first SNP, and is in the promoter, in the UTR, or in an intron or in an exon of a mutated allele.

[0070] According to embodiments of the present invention, the first RNA molecule targets a SNP in the promoter, upstream of the promoter, or the UTR of a mutated allele and the second RNA molecule is designed to target a sequence which is present in an intron of both the mutated allele and the functional allele.

[0071] According to embodiments of the present invention, the first RNA molecule targets a sequence upstream of the promotor which is present in both a mutated and functional allele and the second RNA molecule targets a SNP or disease-causing mutation in any location of the gene.

[0072] According to embodiments of the present invention, there is provided a method comprising removing an exon containing a disease-causing mutation from a mutated allele, wherein the first RNA molecule or the first and the second RNA molecules target regions flanking an entire exon or a portion of the exon.

[0073] According to embodiments of the present invention, there is provided a method comprising removing multiple exons, the entire open reading frame of a gene, or removing the entire gene.

[0074] According to embodiments of the present invention, the first RNA molecule targets a SNP or disease-causing mutation in an exon or promoter of a mutated allele, and wherein the second RNA molecule targets a SNP in the same or a different exon of the mutated allele, a SNP in an intron, or a sequence in an intron present in both the mutated or functional allele.

[0075] According to embodiments of the present invention, the first RNA molecule or the first and the second RNA molecules target an alternative splicing signal sequence between an exon and an intron of a mutant allele.

[0076] According to embodiments of the present invention, the second RNA molecule targets a sequence present in both a mutated allele and a functional allele.

[0077] According to embodiments of the present invention, the second RNA molecule targets an intron.

[0078] According to embodiments of the present invention, there is provided a method comprising subjecting the mutant allele to insertion or deletion by an error prone non-homologous end joining (NHEJ) mechanism, generating a frameshift in the mutated allele's sequence.

[0079] According to embodiments of the present invention, the frameshift results in inactivation or knockout of the mutated allele.

[0080] According to embodiments of the present invention, the frameshift creates an early stop codon in the mutated allele.

[0081] According to embodiments of the present invention, the frameshift results in nonsense-mediated mRNA decay of the transcript of the mutant allele.

[0082] According to embodiments of the present invention, the inactivating or treating results in a truncated protein encoded by the mutated allele and a functional protein encoded by the functional allele.

[0083] According to some embodiments of the present invention, there is provided use of a composition comprising an RNA molecule comprising a guide sequence portion having 17-20 nucleotides in the sequence of 17-20 contiguous nucleotides set forth in any one of SEQ ID NOs: 1-1990 and a CRISPR nuclease inactivating a mutant FGA allele in a cell, comprising delivering to the cell the RNA molecule comprising a guide sequence portion having 17-20 nucleotides in the sequence of 17-20 contiguous nucleotides set forth in any one of SEQ ID NOs: 1-1990 and the CRISPR nuclease.

[0084] According to embodiments of the present invention, there is provided a medicament comprising an RNA molecule comprising a guide sequence portion having 17-20 nucleotides in the sequence of 17-20 contiguous nucleotides set forth in any one of SEQ ID NOs: 1-1990 and a CRISPR nuclease for use in inactivating a mutant FGA allele in a cell, wherein the medicament is administered by delivering to the cell the composition comprising an RNA molecule comprising a guide sequence portion having 17-20 nucleotides in the sequence of 17-20 contiguous nucleotides set forth in any one of SEQ ID NOs: 1-1990 and a CRISPR nuclease.

[0085] According to some embodiments of the present invention, there is provided use of a composition comprising an RNA molecule comprising a guide sequence portion having 17-20 nucleotides in the sequence of 17-20 contiguous nucleotides set forth in any one of SEQ ID NOs: 1-1990 and a CRISPR nuclease for treating ameliorating or preventing AFib amyloidosis, comprising delivering to a subject having or at risk of having AFib amyloidosis the composition of comprising an RNA molecule comprising a guide sequence portion having 17-20 nucleotides in the sequence of 17-20 contiguous nucleotides set forth in any one of SEQ ID NOs: 1-1990 and a CRISPR nuclease.

[0086] According to some embodiments of the present invention, there is provided a medicament comprising the composition comprising an RNA molecule comprising a guide sequence portion having 17-20 nucleotides in the sequence of 17-20 contiguous nucleotides set forth in any one of SEQ ID NOs: 1-1990 and a CRISPR nuclease for use in treating ameliorating or preventing AFib amyloidosis, wherein the medicament is administered by delivering to a subject having or at risk of having AFib amyloidosis: the composition comprising an RNA molecule comprising a guide sequence portion having 17-20 nucleotides in the sequence of 17-20 contiguous nucleotides set forth in any one of SEQ ID NOs: 1-1990 and a CRISPR nuclease.

[0087] According to some embodiments of the present invention, there is provided a kit for inactivating a mutant FGA allele in a cell, comprising an RNA molecule comprising a guide sequence portion having 17-20 nucleotides in the sequence of 17-20 contiguous nucleotides set forth in any one of SEQ ID NOs: 1-1990, a CRISPR nuclease, and/or a tracrRNA molecule; and instructions for delivering the RNA molecule; CRISPR nuclease, and/or the tracrRNA to the cell.

[0088] According to some embodiments of the present invention, there is provided a kit for treating AFib amyloidosis in a subject, comprising an RNA molecule comprising a guide sequence portion having 17-20 nucleotides in the sequence of 17-20 contiguous nucleotides set forth in any one of SEQ ID NOs: 1-1990, a CRISPR nuclease, and/or a tracrRNA molecule; and instructions for delivering the RNA molecule; CRISPR nuclease, and/or the tracrRNA to a subject having or at risk of having AFib amyloidosis.

[0089] In embodiments of the present invention, the RNA molecule comprises a guide sequence portion having 17-20 nucleotides in the sequence of 17-20 contiguous nucleotides set forth in any one of SEQ ID NOs: 1-409, SEQ ID NOs: 410-1990, or SEQ ID NOs 1-1990.

[0090] The compositions and methods of the present disclosure may be utilized for treating, preventing, ameliorating, or slowing progression of amyloidosis, such as AFib amyloidosis.

[0091] In some embodiments, a mutated allele is deactivated by delivering to a cell an RNA molecule which targets a SNP in the promoter region, the start codon, or the untranslated region (UTR) of the mutated allele.

[0092] In some embodiments, a mutated allele is inactivated by removing at least a portion of the promoter and/or removing the start codon and/or a portion of the UTR. In some embodiments, the method of deactivating a mutated allele comprises removing at least a portion of the promoter. In such embodiments one RNA molecule may be designed for targeting a first SNP in the promoter or upstream to the promoter and another RNA molecule is designed to target a second SNP, which is downstream of the first SNP, and is in the promoter, in the UTR, or in an intron or in an exon. Alternatively, one RNA molecule may be designed for targeting a SNP in the promoter, or upstream of the promoter, or the UTR and another RNA molecule is designed to target a sequence which is present in an intron of both the mutated allele and the functional allele. Alternatively, one RNA molecule may be designed for targeting a sequence upstream of the promotor which is present in both the mutated and functional allele and the other guide is designed to target a SNP or disease-causing mutation in any location of the gene e.g., in an exon, intron, UTR, or downstream of the promoter.

[0093] In some embodiments, the method of deactivating a mutated allele comprises an exon skipping step comprising removing an exon containing a disease-causing mutation from the mutated allele. Removing an exon containing a disease-causing mutation in the mutated allele requires two RNA molecules which target regions flanking the entire exon or a portion of the exon. Removal of an exon containing the disease-causing mutation may be designed to eliminate the disease-causing action of the protein while allowing for expression of the remaining protein product which retains some or all of the wild-type activity. As an alternative to single exon skipping, multiple exons, the entire open reading frame or the entire gene can be excised using two RNA molecules flanking the region desired to be excised.

[0094] In some embodiments, the method of deactivating a mutated allele comprises delivering two RNA molecules to a cell, wherein one RNA molecule targets a SNP or disease-causing mutation in an exon or promoter of the mutated allele, and wherein the other RNA molecule targets a SNP in the same or a different exon of the mutated allele, a SNP in an intron, or a sequence in an intron present in both the mutated or functional allele.

[0095] In some embodiments, an RNA molecule is used to target a CRISPR nuclease to an alternative splicing signal sequence between an exon and an intron of a mutant allele, thereby destroying the alternative splicing signal sequence in the mutant allele.

[0096] Any one of, or combination of, the above-mentioned strategies for deactivating a mutant allele may be used in the context of the invention.

[0097] Additional strategies may be used to deactivate a mutated allele. For example, in embodiments of the present invention, an RNA molecule is used to direct a CRISPR nuclease to an exon or a splice site of a mutated allele in order to create a double-stranded break (DSB), leading to insertion or deletion of nucleotides by an error-prone non-homologous end-joining (NHEJ) mechanism and formation of a frameshift mutation in the mutated allele. The frameshift mutation may result in: (1) inactivation or knockout of the mutated allele by generation of an early stop codon in the mutated allele, resulting in generation of a truncated protein; or (2) nonsense mediated mRNA decay of the transcript of the mutant allele. In further embodiments, one RNA molecule is used to direct a CRISPR nuclease to a promotor of a mutated allele.

[0098] In some embodiments, the method of deactivating a mutated allele further comprises enhancing activity of the functional protein such as by providing a protein/peptide, a nucleic acid encoding a protein/peptide, or a small molecule such as a chemical compound, capable of activating/enhancing activity of the functional protein.

[0099] According to some embodiments, the present disclosure provides an RNA sequence (‘RNA molecule’) which binds to/associates with and/or directs the RNA guided DNA nuclease e.g., CRISPR nuclease to a sequence comprising at least one nucleotide which differs between a mutated allele and a functional allele (e.g., SNP) of a gene of interest (i.e., a sequence of the mutated allele which is not present in the functional allele).

[0100] In some embodiments, the method comprises the steps of: contacting a mutated allele of a gene of interest with an allele-specific RNA molecule and a CRISPR nuclease e.g., a Cas9 protein, wherein the allele-specific RNA molecule and the CRISPR nuclease e.g., Cas9 associate with a nucleotide sequence of the mutated allele of the gene of interest which differs by at least one nucleotide from a nucleotide sequence of a functional allele of the gene of interest, thereby modifying or knocking-out the mutated allele.

[0101] In some embodiments, the allele-specific RNA molecule and a CRISPR nuclease is introduced to a cell encoding the gene of interest. In some embodiments, the cell encoding the gene of interest is in a mammalian subject. In some embodiments, the cell encoding the gene of interest is in a plant.

[0102] In some embodiments, the cleaved mutated allele is further subjected to insertion or deletion (indel) by an error prone non-homologous end joining (NHEJ) mechanism, generating a frameshift in the mutated allele's sequence. In some embodiments, the generated frameshift results in inactivation or knockout of the mutated allele. In some embodiments, the generated frameshift creates an early stop codon in the mutated allele and results in generation of a truncated protein. In such embodiments, the method results in the generation of a truncated protein encoded by the mutated allele and a functional protein encoded by the functional allele. In some embodiments, a frameshift generated in a mutated allele using the methods of the invention results in nonsense-mediated mRNA decay of the transcript of the mutant allele.

[0103] In some embodiments, the mutated allele is an allele of fibrinogen alpha chain (FGA) gene. In some embodiments, the RNA molecule targets a SNP which co-exists with/is genetically linked to the mutated sequence associated with AFib amyloidosis genetic disorder. In some embodiments, the RNA molecule targets a SNP which is highly prevalent in the population and exists in the mutated allele having the mutated sequence associated with AFib amyloidosis genetic disorder and not in the functional allele of an individual subject to be treated. In some embodiments, a disease-causing mutation within a mutated FGA allele is targeted.

[0104] In some embodiments, the SNP is within an exon of the gene of interest. In such embodiments, a guide sequence portion of an RNA molecule may be designed to associate with a sequence of the exon of the gene of interest.

[0105] In some embodiments, SNP is within an intron or an exon of the gene of interest. In some embodiments, SNP is in close proximity to a splice site between the intron and the exon. In some embodiments, the close proximity to a splice site is 1, 2, 3, 4, 5, 6, 7, 8, 9, 10, 11, 12, 13, 14, 15, 16, 17, 18, 19, or 20 nucleotides upstream or downstream to the splice site. Each possibility represents a separate embodiment of the present invention. In such embodiments, a guide sequence portion of an RNA molecule may be designed to associate with a sequence of the gene of interest which comprises the splice site.

[0106] In some embodiments, the method is utilized for treating a subject having a disease phenotype resulting from the heterozygote FGA gene. In such embodiments, the method results in improvement, amelioration or prevention of the disease phenotype.

[0107] Embodiments referred to above refer to a CRISPR nuclease, RNA molecule(s), and tracrRNA being effective in a subject or cells at the same time. The CRISPR, RNA molecule(s), and tracrRNA can be delivered substantially at the same time or can be delivered at different times but have effect at the same time. For example, this includes delivering the CRISPR nuclease to the subject or cells before the RNA molecule and/or tracr RNA is substantially extant in the subject or cells.

[0108] In some embodiments, the cell is a liver cell. In some embodiments, the cell is a hepatocyte cell.

### Dominant Genetic Disorders

[0109] One of skill in the art will appreciate that all subjects with any type of heterozygote genetic disorder (e.g., dominant genetic disorder) may be subjected to the methods described herein. In one embodiment, the present invention may be used to target a gene involved in, associated with, or causative of dominant genetic disorders such as, for example, AFib amyloidosis. In some embodiments, the dominant genetic disorder is AFib amyloidosis. In some embodiments, the target gene is the FGA gene (Entrez Gene, gene ID No: 2243).

### CRISPR Nucleases and PAM Recognition

[0110] In some embodiments, the sequence specific nuclease is selected from CRISPR nucleases, or a functional variant thereof. In some embodiments, the sequence specific nuclease is an RNA guided DNA nuclease. In such embodiments, the RNA sequence which guides the RNA guided DNA nuclease (e.g., Cpf1) binds to and/or directs the RNA guided DNA nuclease to the sequence comprising at least one nucleotide which differs between a mutated allele and its counterpart functional allele (e.g., SNP). In some embodiments, the CRISPR complex does not further comprise a tracrRNA. In a non-limiting example, in which the RNA guided DNA nuclease is a CRISPR protein, the at least one nucleotide which differs between the dominant mutated allele and the functional allele may be within the PAM site and/or proximal to the PAM site within the region that the RNA molecule is designed to hybridize to. A skilled artisan will appreciate that RNA molecules can be engineered to bind to a target of choice in a genome by commonly known methods in the art.

[0111] In embodiments of the present invention, a type II CRISPR system utilizes a mature crRNA:tracrRNA complex directs a CRISPR nuclease, e.g. Cas9, to the target DNA via Watson-Crick base-pairing between the crRNA and the protospacer on the target DNA next to the protospacer adjacent motif (PAM), an additional requirement for target recognition. The CRISPR nuclease then mediates cleavage of target DNA to create a double-stranded break within the protospacer. A skilled artisan will appreciate that each of the engineered RNA molecule of the present invention is further designed such as to associate with a target genomic DNA sequence of interest next to a protospacer adjacent motif (PAM), e.g., a PAM matching the sequence relevant for the type of CRISPR nuclease utilized, such as for a non-limiting example, NGG or NAG, wherein “N” is any nucleobase, for Streptococcus pyogenes Cas9 WT (SpCAS9); NNGRRT for Staphylococcus aureus (SaCas9); NNNVRYM for Jejuni Cas9 WT; NGAN or NGNG for SpCas9-VQR variant; NGCG for SpCas9-VRER variant; NGAG for SpCas9-EQR variant; NNNNGATT for Neisseria meningitidis (NmCas9); or TTTV for Cpf1. RNA molecules of the present invention are each designed to form complexes in conjunction with one or more different CRISPR nucleases and designed to target polynucleotide sequences of interest utilizing one or more different PAM sequences respective to the CRISPR nuclease utilized.

[0112] In some embodiments, an RNA-guided DNA nuclease e.g., a CRISPR nuclease, may be used to cause a DNA break at a desired location in the genome of a cell. The most commonly used RNA-guided DNA nucleases are derived from CRISPR systems, however, other RNA-guided DNA nucleases are also contemplated for use in the genome editing compositions and methods described herein. For instance, see U.S. Patent Publication No. 2015-0211023, incorporated herein by reference.

[0113] CRISPR systems that may be used in the practice of the invention vary greatly. CRISPR systems can be a type I, a type II, or a type III system. Non-limiting examples of suitable CRISPR proteins include Cas3, Cas4, Cas5, Cas5e (or CasD), Cas6, Cas6e, Cas6f, Cas7, Cas8a1, Cas8a2, Cas8b, Cas8c, Cas9, Cas10, Cas1 Od, CasF, CasG, CasH, Csy1, Csy2, Csy3, Cse1 (or CasA), Cse2 (or CasB), Cse3 (or CasE), Cse4 (or CasC), Csc1, Csc2, Csa5, Csn2, Csm2, Csm3, Csm4, Csm5, Csm6, Cmr1, Cmr3, Cmr4, Cmr5, Cmr6, Csb1, Csb2, Csb3, Csx17, Csx14, Csx10, Csx16, CsaX, Csx3, Csz1, Csx15, Csf1, Csf2, Csf3, Csf4, and Cul966.

[0114] In some embodiments, the RNA-guided DNA nuclease is a CRISPR nuclease derived from a type II CRISPR system (e.g., Cas9). The CRISPR nuclease may be derived from Streptococcus pyogenes, Streptococcus thermophilus, Streptococcus sp., Staphylococcus aureus, Neisseria meningitidis, Treponema denticola, Nocardiopsis dassonvillei, Streptomyces pristinaespiralis, Streptomyces viridochromogenes, Streptomyces viridochromogenes, Streptosporangium roseum, Streptosporangium roseum, Alicyclobacillus acidocaldarius, Bacillus pseudomycoides, Bacillus selenitireducens, Exiguobacterium sibiricum, Lactobacillus delbrueckii, Lactobacillus salivarius, Microscilla marina, Burkholderiales bacterium, Polaromonas naphthalenivorans, Polaromonas sp., Crocosphaera watsonii, Cyanothece sp., Microcystis aeruginosa, Synechococcus sp., Acetohalobium arabaticum, Ammonifex degensii, Caldicelulosiruptor becscii, Candidatus Desulforudis, Clostridium botulinum, Clostridium difficile, Finegoldia magna, Natranaerobius thermophilus, Pelotomaculumthermopropionicum, Acidithiobacillus caldus, Acidithiobacillus ferrooxidans, Allochromatium vinosum, Marinobacter sp., Nitrosococcus halophilus, Nitrosococcus watsoni, Pseudoalteromonas haloplanktis, Ktedonobacter racemifer, Methanohalobium evestigatum, Anabaena variabilis, Nodularia spumigena, Nostoc sp., Arthrospira maxima, Arthrospira platensis, Arthrospira sp., Lyngbya sp., Microcoleus chthonoplastes, Oscillatoria sp., Petrotoga mobilis, Thermosipho africanus, Acaryochloris marina, or any species which encodes a CRISPR nuclease with a known PAM sequence. CRISPR nucleases encoded by uncultured bacteria may also be used in the context of the invention. (See Burstein et al. Nature, 2017). Variants of CRIPSR proteins having known PAM sequences e.g., spCas9 D1135E variant, spCas9 VQR variant, spCas9 EQR variant, or spCas9 VRER variant may also be used in the context of the invention.

[0115] Thus, an RNA guided DNA nuclease of a CRISPR system, such as a Cas9 protein or modified Cas9 or homolog or ortholog of Cas9, or other RNA guided DNA nucleases belonging to other types of CRISPR systems, such as Cpf1 and its homologs and orthologs, may be used in the compositions of the present invention.

[0116] In certain embodiments, the CRIPSR nuclease may be a “functional derivative” of a naturally occurring Cas protein. A “functional derivative” of a native sequence polypeptide is a compound having a qualitative biological property in common with a native sequence polypeptide. “Functional derivatives” include, but are not limited to, fragments of a native sequence and derivatives of a native sequence polypeptide and its fragments, provided that they have a biological activity in common with a corresponding native sequence polypeptide. A biological activity contemplated herein is the ability of the functional derivative to hydrolyze a DNA substrate into fragments. The term “derivative” encompasses both amino acid sequence variants of polypeptide, covalent modifications, and fusions thereof. Suitable derivatives of a Cas polypeptide or a fragment thereof include but are not limited to mutants, fusions, covalent modifications of Cas protein or a fragment thereof. Cas protein, which includes Cas protein or a fragment thereof, as well as derivatives of Cas protein or a fragment thereof, may be obtainable from a cell or synthesized chemically or by a combination of these two procedures. The cell may be a cell that naturally produces Cas protein, or a cell that naturally produces Cas protein and is genetically engineered to produce the endogenous Cas protein at a higher expression level or to produce a Cas protein from an exogenously introduced nucleic acid, which nucleic acid encodes a Cas that is same or different from the endogenous Cas. In some cases, the cell does not naturally produce Cas protein and is genetically engineered to produce a Cas protein.

[0117] In some embodiments, the CRISPR nuclease is Cpf1. Cpf1 is a single RNA-guided endonuclease which utilizes a T-rich protospacer-adjacent motif. Cpf1 cleaves DNA via a staggered DNA double-stranded break. Two Cpf1 enzymes from Acidaminococcus and Lachnospiraceae have been shown to carry out efficient genome-editing activity in human cells. (See Zetsche et al. (2015) Cell.).

[0118] Thus, an RNA guided DNA nuclease of a Type II CRISPR System, such as a Cas9 protein or modified Cas9 or homologs, orthologues, or variants of Cas9, or other RNA guided DNA nucleases belonging to other types of CRISPR systems, such as Cpf1 and its homologs, orthologues, or variants, may be used in the present invention.

[0119] In some embodiments, the guide molecule comprises one or more chemical modifications which imparts a new or improved property (e.g., improved stability from degradation, improved hybridization energetics, or improved binding properties with an RNA guided DNA nuclease). Suitable chemical modifications include, but are not limited to: modified bases, modified sugar moieties, or modified inter-nucleoside linkages. Non-limiting examples of suitable chemical modifications include: 4-acetylcytidine, 5-(carboxyhydroxymethyl)uridine, 2′-O-methylcytidine, 5-carboxymethylaminomethyl-2-thiouridine. 5-carboxy methylaminomethyluridine, dihydrouridine, 2′-O-methylpseudouridine, “beta, D-galactosylqueuosine”, 2′-O-methylguanosine, inosine, N6-isopentenyladenosine, 1-methyladenosine, 1-methylpseudouridine, 1-methylguanosine, 1-methylinosine, “2,2-dimethylguanosine”, 2-methyladenosine, 2-methylguanosine, 3-methylcytidine, 5-methylcytidine. N6-methyladenosine, 7-methylguanosine, 5-methylaminomethyluridine, 5-methoxyaminomethyl-2-thiouridine, “beta, D-mannosylqueuosine”, 5-methoxycarbonylmethyl-2-thiouridine, 5-methoxycarbonylmethyluridine, 5-methoxyuridine, 2-methylthio-N6-isopentenyladenosine. N-((9-beta-D-ribofuranosyl-2- methylthiopurine-6-yl)carbamoyl)threonine, N-((9-beta-D-ribofuranosylpurine-6-yl)N-methylcarbamoyl)threonine, uridine-5-oxyacetic acid-methylester, uridine-5-oxyacetic acid, wybutoxosine, queuosine, 2-thiocytidine, 5-methyl-2-thiouridine, 2-thiouridine, 4-thiouridine, 5-methyluridine, N-((9-beta-D-ribofuranosylpurine-6-yl)-carbamoyl)threonine, 2′-O-methyl-5-methyluridine, 2′-O-methyluridine, wybutosine, “3-(3-amino-3-carboxy-propyl)uridine, (acp3) u”, 2′-0-methyl (M), 3′-phosphorothioate (MS), 3′-thioPACE (MSP), pseudouridine, or 1-methyl pseudo-uridine. Each possibility represents a separate embodiment of the present invention.

### Guide Sequences Which Specifically Target a Mutant Allele

[0120] A given gene may contain thousands of SNPs. Utilizing a 24 base pair target window for targeting each SNP in a gene would require hundreds of thousands of guide sequences. Any given guide sequence when utilized to target a SNP may result in degradation of the guide sequence, limited activity, no activity, or off-target effects. Accordingly, suitable guide sequences are necessary for targeting a given gene. By the present invention, a novel set of guide sequences have been identified for knocking out expression of a mutated FGA protein, inactivating a mutant FGA gene allele, and treating Fibrinogen A alpha chain amyloidosis.

[0121] The present disclosure provides guide sequences capable of specifically targeting a mutated allele for inactivation while leaving the functional allele unmodified. The guide sequences of the present invention are designed to, and are most likely to, specifically differentiate between a mutated allele and a functional allele. Of all possible guide sequences which target a mutated allele desired to be inactivated, the specific guide sequences disclosed herein are specifically effective to function with the disclosed embodiments.

[0122] Briefly, the guide sequences may have properties as follows: (1) target SNP/insertion/deletion/indel with a high prevalence in the general population, in a specific ethnic population or in a patient population is above 1% and the SNP/insertion/deletion/indel heterozygosity rate in the same population is above 1%; (2) target a location of a SNP/insertion/deletion/indel proximal to a portion of the gene e.g., within 5 k bases of any portion of the gene, for example, a promoter, a UTR, an exon or an intron; and (3)target a mutant allele using an RNA molecule which targets a founder or common pathogenic mutations for the disease/gene. In some embodiments, the prevalence of the SNP/insertion/deletion/indel in the general population, in a specific ethnic population or in a patient population is above 1%, 2%, 3%, 4%, 5%, 6%, 7%, 8%, 9%, 10%, 11%, 12%, 13%, 14%, or 15% and the SNP/insertion/deletion/indel heterozygosity rate in the same population is above 1%, 2%, 3%, 4%, 5%, 6%, 7%, 8%, 9%, 10%, 11%, 12%, 13%, 14%, or 15%. Each possibility represents a separate embodiment and may be combined at will.

[0123] For each gene, according to SNP/insertion/deletion/indel any one of the following strategies may be used to deactivate the mutated allele: (1) Knockout strategy using one RNA molecule-one RNA molecule is utilized to direct a CRISPR nuclease to a mutated allele and create a double-strand break (DSB) leading to formation of a frameshift mutation in an exon or in a splice site region of the mutated allele; (2) Knockout strategy using two RNA molecules—two RNA molecules are utilized. A first RNA molecule targets a region in the promoter or an upstream region of a mutated allele and another RNA molecule targets downstream of the first RNA molecule in a promoter, exon, or intron of the mutated allele; (3) Exon(s) skipping strategy—one RNA molecule may be used to target a CRISPR nuclease to a splice site region, either at the 5′ end of an intron (donor sequence) or the 3′ end of an intron (acceptor sequence), in order to destroy the splice site. Alternatively, two RNA molecules may be utilized such that a first RNA molecule targets an upstream region of an exon and a second RNA molecule targets a region downstream of the first RNA molecule, thereby excising the exon(s). Based on the locations of identified SNPs/insertions/deletions/indels for each mutant allele, any one of, or a combination of, the above-mentioned methods to deactivate the mutant allele may be utilized.

[0124] When only one RNA molecule is used is that the location of the SNP is in an exon or in close proximity (e.g., within 20 basepairs) to a splice site between the intron and the exon. When two RNA molecules are used, guide sequences may target two SNPs such that the first SNP is upstream of exon 1 e.g., within the 5′ untranslated region, or within the promoter or within the first 2 kilobases 5′ of the transcription start site, and the second SNP is downstream of the first SNP e.g., within the first 2 kilobases 5′ of the transcription start site, or within intron 1, 2 or 3, or within exon 1, exon 2, or exon 3.

[0125] Guide sequences of the present invention may target a SNP in the upstream portion of the targeted gene, preferably upstream of the last exon of the targeted gene. Guide sequences may target a SNP upstream to exon 1, for example within the 5′ untranslated region, or within the promoter or within the first 4-5 kilobases 5′ of the transcription start site.

[0126] Guide sequences of the present invention may also target a SNP within close proximity (e.g., within 50 basepairs, more preferably with 20 basepairs) to a known protospacer adjacent motif (PAM) site.

[0127] Guide sequences of the present invention also may target: (1) a heterozygous SNP for the targeted gene; (2) a heterozygous SNPs upstream and downstream of the gene; (3) a SNPs with a prevalence of the SNP/insertion/deletion/indel in the general population, in a specific ethnic population, or in a patient population above 1%; (4) have a guanine-cytosine content of greater than 30% and less than 85%; (5) have no repeat of 4 or more thymine/uracil or 8 or more guanine, cytosine, or adenine; (6) having no off-target identified by off-target analysis; and (7) preferably target Exons over Introns or be upstream of a SNP rather than downstream of a SNP.

[0128] In embodiments of the present invention, the SNP may be upstream or downstream of the gene. In embodiments of the present invention, the SNP is within 4,000 base pairs upstream or downstream of the gene.

[0129] The at least one nucleotide which differs between the mutated allele and the functional allele, may be upstream, downstream or within the sequence of the disease-causing mutation of the gene of interest. The at least one nucleotide which differs between the mutated allele and the functional allele, may be within an exon or within an intron of the gene of interest. In some embodiments, the at least one nucleotide which differs between the mutated allele and the functional allele is within an exon of the gene of interest. In some embodiments, the at least one nucleotide which differs between the mutated allele and the functional allele is within an intron or an exon of the gene of interest, in close proximity to a splice site between the intron and the exon e.g., 1, 2, 3, 4, 5, 6, 7, 8, 9, 10, 11, 12, 13, 14, 15, 16, 17, 18, 19, or 20 nucleotides upstream or downstream to the splice site.

[0130] In some embodiments, the at least one nucleotide is a single nucleotide polymorphisms (SNPs). In some embodiments, each of the nucleotide variants of the SNP may be expressed in the mutated allele. In some embodiments, the SNP may be a founder or common pathogenic mutation.

[0131] Guide sequences may target a SNP which has both (1) a high prevalence in the general population e.g., above 1% in the population; and (2) a high heterozygosity rate in the population, e.g., above 1%. Guide sequences may target a SNP that is globally distributed. A SNP may be a founder or common pathogenic mutation. In some embodiments, the prevalence in the general population is above 1%, 2%, 3%, 4%, 5%, 6%, 7%, 8%, 9%, 10%, 11%, 12%, 13%, 14%, or 15%. Each possibility represents a separate embodiment. In some embodiments, the heterozygosity rate in the population is above 1%, 2%, 3%, 4%, 5%, 6%, 7%, 8%, 9%, 10%, 11%, 12%, 13%, 14%, or 15%. Each possibility represents a separate embodiment.

[0132] In some embodiments, the at least one nucleotide which differs between the mutated allele and the functional allele is linked to/co-exists with the disease-causing mutation in high prevalence in a population. In such embodiments, “high prevalence” refers to at least 92%, 93%, 94%, 95%, 96%, 97%, 98%, 99%, or 100%. Each possibility represents a separate embodiment of the present invention. In one embodiment, the at least one nucleotide which differs between the mutated allele and the functional allele, is a disease-associated mutation. In some embodiments, the SNP is highly prevalent in the population. In such embodiments, “highly prevalent” refers to at least 10%, 11%, 12%, 13%, 14%, 15%, 20%, 30%, 40%, 50%, 60%, or 70% of a population. Each possibility represents a separate embodiment of the present invention.

[0133] Guide sequences of the present invention may satisfy any one of the above criteria and are most likely to differentiate between a mutated allele from its corresponding functional allele.

[0134] In some embodiments the RNA molecule targets a SNP/WT sequence linked to SNPs as shown in Table 1 below. The SNP details are indicated in the 1^{st} column and include: SNP ID No. (based on NCBI's 2018 database of Single Nucleotide Polymorphisms (dbSNP)). For variants with no available rs number variants characteristic are indicated based on gnomAD 2018 browser database. The 2^{nd} column indicates an assigned identifier for each SNP. The 3^{rd} column indicates the location of each SNP on the FGA gene.

TABLE 1
FGA gene SNPs

| RSID | SNP No. | SNP location in the gene |
|---|---|---|
| rs28401745 | s1 | upstream −2871 bp |
| rs2070033 | s2 | Exon_6 of 6 |
| rs7659613 | s3 | upstream −3498 bp |
| rs4696596 | s4 | upstream −3944 bp |
| rs2070009 | s5 | upstream −1023 bp |
| rs2070006 | s6 | upstream −1948 bp |
| rs2070011 | s7 | Exon_1 of 6 |
| rs199768069 | s8 | Exon_6 of 6 |
| rs2070017 | s9 | Intron_2 of 5 |
| rs72955372 | s10 | upstream −2209 bp |
| rs77473178 | s11 | downstream +54 bp |
| rs2070027 | s12 | Intron_2 of 5 |
| rs6050 | s13 | Exon_5 of 6 |
| rs13109457 | s14 | upstream −2961 bp |
| rs2070014 | s15 | Intron_2 of 5 |
| rs2070022 | s16 | Exon_6 of 6 |
| rs1984906 | s17 | upstream −3568 bp |
| rs2070016 | s18 | Intron_2 of 5 |
| rs121909612 | s19 | Exon_5 of 6 |
| rs2070018 | s20 | Intron_4 of 5 |
| rs2070026 | s21 | Intron_2 of 5 |
| rs2070023 | s22 | upstream −1981 bp |
| rs7656433 | s23 | Intron_2 of 5 |
| rs6050 | S24 | Exon_5 of 6 |

[0135] In some embodiments, the RNA molecule targets SNP ID rs6050 located at exon 5 upstream to an FGA mutation.

[0136] In some embodiments, a first RNA molecule targets a SNP/WT sequence of SNP ID rs2070018 located at intron 4 upstream to an FGA mutation and another RNA molecule targets intron 5. (FIG. 1).

[0137] In some embodiments the suitable RNA molecules target the genomic region chr4:155,505,986-155,506,689 (hg19) of the FGA gene, which related to intron 5 of the long transcript NM_000508 of the FGA gene.

[0138] In some embodiments a first RNA molecule comprises a nucleotide sequence located at intron 4, or a SNP/WT sequence of SNP ID rs2070018, and another RNA molecule targets a SNP/WT sequence located at exon 6 downstream of an FGA mutation, and optionally at least a portion of exon 6 may be removed. In some embodiments other RNA molecule targeting a SNP/WT sequence located at exon 6 downstream of the FGA mutation, targets one of SNP IDs rs2070033, rs19976806, or rs2070022. (FIG. 2A-FIG. 2C).

[0139] In some embodiments, a first RNA molecule targets a SNP/WT sequence of SNP ID rs2070018 located at intron 4 upstream to an FGA mutation, and another RNA molecule targets a SNP/WT sequence downstream to the gene such as SNP ID rs77473178. (FIG. 2D).

[0140] In some embodiments, a first RNA molecule targets a sequence in intron 4 and another RNA molecule targets a sequence in an upstream intron, such as intron 2. In further embodiments, to discriminate between the functional and mutated alleles, at least one sequence in intron 4 and the sequence in intron 2 is a SNP/WT sequence linked to an FGA mutation. In some embodiments the SNP in intron 4 is SNP ID rs2070018. In further embodiments, other sequences of intron 4 may be targeted. In some embodiments the target sequence in intron 2 is one of rs7656433, rs2070017, rs2070027, rs2070026, rs2070014, and rs2070016. In further embodiments, other sequences of intron 2 may be targeted. (FIG. 3).

[0141] In some embodiments, a first RNA molecule targets a sequence in intron 1 and another RNA molecule targets a SNP/WT sequence of SNP ID rs2070018 located at intron 4 upstream to an FGA mutation. (FIG. 4A).

[0142] In some embodiments, a first RNA molecule targets a sequence in intron 4 of the FGA gene or a SNP in intron 4, such as SNP ID rs2070018, and another RNA molecule targets a SNP in exon 1, such as SNP ID rs2070011, optionally at least a portion of exon 1, which encodes a signal peptide, is also removed. In further embodiments, the sequence of intron 4 is targeted. (FIG. 4B).

[0143] In some embodiments, a first RNA molecule targets a sequence located at intron 3 of the FGA gene and another RNA molecule targets a SNP sequence downstream of the gene. In further embodiments the other RNA molecule may target a SNP/WT sequence located at exon 6 downstream of an FGA mutation. In some embodiments the target SNP/WT sequence located at exon 6 downstream to the FGA mutation is one of SNP IDs rs2070033, rs19976806, or rs2070022. (FIG. 5A-FIG. 5B).

[0144] In some embodiments, a first RNA molecule targets a SNP/WT sequence of SNP ID rs2070018 located at intron 4 upstream to an FGA mutation, including RNA sequences that target a SNP/WT sequence linked to the mutation, and another RNA molecule targets a sequence in intron 3. (FIG. 5C).

[0145] In some embodiments, a first RNA molecule targets a SNP/WT sequence linked to an FGA mutation in the 5′UTR region of the gene, and another RNA molecule targets a sequence in intron 1, a sequence in intron 2, or a SNP/WT sequence linked to the mutation in intron 2. (FIG. 6A-FIG. 6B).

[0146] In further embodiments the sequence linked to an FGA mutation in the 5′URT region of the gene is a sequence in intron 1, a sequence in intron 2, or a SNP/WT sequence linked to the mutation in intron2.

[0147] In some embodiments, a first RNA molecule targets a sequence in intron 1 of the FGA gene and another RNA molecule targets a SNP/WT sequence, linked to an FGA gene mutation, in intron 2. (FIG. 7).

[0148] In some embodiments, a first RNA molecule targets a SNP/WT sequence linked to an FGA gene mutation and another RNA molecule targets a sequence in intron 3. In some embodiments the first RNA molecule targets a SNP/WT sequence linked to an FGA gene mutation in intron 2. (FIG. 8).

[0149] In some embodiments, a first RNA molecule targets a sequence in intron 3 and another RNA molecule targets a SNP in exon 1. In some embodiments, the other RNA molecule targeting a SNP in exon 1 is rs2070011. (FIG. 9).

### Delivery to Cells

[0150] The RNA molecule compositions described herein may be delivered to a target cell by any suitable means. RNA molecule compositions of the present invention may be targeted to any cell which contains and/or expresses a dominant negative allele, including any mammalian or plant cell. For example, in one embodiment the RNA molecule specifically targets a mutated FGA allele and the target cell is a hepatocyte cell.

[0151] In some embodiments, the RNA molecule comprises a chemical modification. Non-limiting examples of suitable chemical modifications include 2′-0-methyl (M), 2′-0-methyl, 3′phosphorothioate (MS) or 2′-0-methyl, 3′thioPACE (MSP), pseudouridine, and 1-methyl pseudo-uridine. Each possibility represents a separate embodiment of the present invention.

[0152] Any suitable viral vector system may be used to deliver nucleic acid compositions e.g., the RNA molecule compositions of the subject invention. Conventional viral and non-viral based gene transfer methods can be used to introduce nucleic acids and target tissues. In certain embodiments, nucleic acids are administered for in vivo or ex vivo gene therapy uses. Non-viral vector delivery systems include naked nucleic acid, and nucleic acid complexed with a delivery vehicle such as a liposome or poloxamer. For a review of gene therapy procedures, see Anderson (1992) Science 256:808-813; Nabel & Felgner (1993) TIBTECH 11:211-217; Mitani & Caskey (1993) TIBTECH 11:162-166; Dillon (1993) TIBTECH 11:167-175; Miller (1992) Nature 357:455-460; Van Brunt (1988) Biotechnology 6 (10):1149-1154; Vigne (1995) Restorative Neurology and Neuroscience 8:35-36; Kremer & Perricaudet (1995) British Medical Bulletin 51(1):31-44; Haddada et al. (1995) in Current Topics in Microbiology and Immunology Doerfler and Bohm (eds.); and Yu et al. (1994) Gene Therapy 1:13-26.

[0153] Methods of non-viral delivery of nucleic acids and/or proteins include electroporation, lipofection, microinjection, biolistics, particle gun acceleration, virosomes, liposomes, immunoliposomes, lipid nanoparticles (LNPs), polycation or lipid:nucleic acid conjugates, artificial virions, and agent-enhanced uptake of nucleic acids or can be delivered to plant cells by bacteria or viruses (e.g., Agrobacterium, Rhizobium sp. NGR234, Sinorhizoboiummeliloti, Mesorhizobium loti, tobacco mosaic virus, potato virus X, cauliflower mosaic virus and cassava vein mosaic virus). (See, e.g., Chung et al. (2006) Trends Plant Sci. 11(1):1-4). Sonoporation using, e.g., the Sonitron 2000 system (Rich-Mar), can also be used for delivery of nucleic acids. Cationic-lipid mediated delivery of proteins and/or nucleic acids is also contemplated as an in vivo or in vitro delivery method. (See Zuris et al. (2015) Nat. Biotechnol. 33(1):73-80; see also Coelho et al. (2013) N. Engl. J. Med. 369, 819-829; Judge et al. (2006) Mol. Ther. 13, 494-505; and Basha et al. (2011) Mol. Ther. 19, 2186-2200).

[0154] Additional exemplary nucleic acid delivery systems include those provided by Amaxa.R™. Biosystems (Cologne, Germany), Maxcyte, Inc. (Rockville, Md.), BTX Molecular Delivery Systems (Holliston, Mass.) and Copernicus Therapeutics Inc., (see, e.g., U.S. Pat. No. 6,008,336). Lipofection is described in e.g., U.S. Pat. Nos. 5,049,386, 4,946,787; and 4,897,355, and lipofection reagents are sold commercially (e.g., Transfectam.™. Lipofectin.™. and Lipofectamine.™. RNAiMAX). Cationic and neutral lipids that are suitable for efficient receptor-recognition lipofection of polynucleotides include those of Felgner, WO 91/17424, WO 91/16024. Delivery can be to cells (ex vivo administration) or target tissues (in vivo administration).

[0155] The preparation of lipid: nucleic acid complexes, including targeted liposomes such as immunolipid complexes, is well known to one of skill in the art (See, e.g., Crystal (1995) Science 270:404-410; Blaese et al. (1995) Cancer Gene Ther. 2:291-297; Behr et al. (1994) Bioconjugate Chem. 5:382-389; Remy et al. (1994) Bioconjugate Chem. 5:647-654; Gao et al. (1995) Gene Therapy 2:710-722; Ahmad et al. (1992) Cancer Res. 52:4817-4820; U.S. Pat. Nos. 4,186,183, 4,217,344, 4,235,871, 4,261,975, 4,485,054, 4,501,728, 4,774,085, 4,837,028, and 4,946,787).

[0156] Additional methods of delivery include the use of packaging the nucleic acids to be delivered into EnGeneIC delivery vehicles (EDVs). These EDVs are specifically delivered to target tissues using bispecific antibodies where one arm of the antibody has specificity for the target tissue and the other has specificity for the EDV. The antibody brings the EDVs to the target cell surface and then the EDV is brought into the cell by endocytosis. Once in the cell, the contents are released (See MacDiarmid et al (2009) Nature Biotechnology 27(7):643).

[0157] The use of RNA or DNA viral based systems for viral mediated delivery of nucleic acids take advantage of highly evolved processes for targeting a virus to specific cells in the body and trafficking the viral payload to the nucleus. Viral vectors can be administered directly to patients (in vivo) or they can be used to treat cells in vitro and the modified cells are administered to patients (ex vivo). Conventional viral based systems for the delivery of nucleic acids include, but are not limited to, retroviral, lentivirus, adenoviral, adeno-associated, vaccinia and herpes simplex virus vectors for gene transfer.

[0158] The tropism of a retrovirus can be altered by incorporating foreign envelope proteins, expanding the potential target population of target cells. Lentiviral vectors are retroviral vectors that are able to transduce or infect non-dividing cells and typically produce high viral titers. Selection of a retroviral gene transfer system depends on the target tissue. Retroviral vectors are comprised of cis-acting long terminal repeats with packaging capacity for up to 6-10 kb of foreign sequence. The minimum cis-acting LTRs are sufficient for replication and packaging of the vectors, which are then used to integrate the therapeutic gene into the target cell to provide permanent transgene expression. Widely used retroviral vectors include those based upon murine leukemia virus (MuLV), gibbon ape leukemia virus (GaLV), Simian Immunodeficiency virus (SIV), human immunodeficiency virus (HIV), and combinations thereof (See, e.g., Buchschacher et al. (1992) J. Virol. 66:2731-2739; Johann et al. (1992) J. Virol. 66:1635-1640; Sommerfelt et al. (1990) Virol. 176:58-59; Wilson et al. (1989) J. Virol. 63:2374-2378; Miller et al. (1991) J. Virol. 65:2220-2224; PCT/US94/05700).

[0159] At least six viral vector approaches are currently available for gene transfer in clinical trials, which utilize approaches that involve complementation of defective vectors by genes inserted into helper cell lines to generate the transducing agent.

[0160] pLASN and MFG-S are examples of retroviral vectors that have been used in clinical trials (Dunbar et al. (1995) Blood 85:3048-305; Kohn et al. (1995) Nat. Med. 1:1017-102; Malech et al. (1997) PNAS 94:22 12133-12138). PA317/pLASN was the first therapeutic vector used in a gene therapy trial. (Blaese et al. (1995). Transduction efficiencies of 50% or greater have been observed for MFG-S packaged vectors. (Ellem et al. (1997) Immunol Immunother. 44(1):10-20; Dranoff et al. (1997) Hum. Gene Ther. 1:111-2).

[0161] Packaging cells are used to form virus particles that are capable of infecting a host cell. Such cells include 293 cells, which package adenovirus, AAV, and Psi-2 cells or PA317 cells, which package retrovirus. Viral vectors used in gene therapy are usually generated by a producer cell line that packages a nucleic acid vector into a viral particle. The vectors typically contain the minimal viral sequences required for packaging and subsequent integration into a host (if applicable), other viral sequences being replaced by an expression cassette encoding the protein to be expressed. The missing viral functions are supplied in trans by the packaging cell line. For example, AAV vectors used in gene therapy typically only possess inverted terminal repeat (ITR) sequences from the AAV genome which are required for packaging and integration into the host genome. Viral DNA is packaged in a cell line, which contains a helper plasmid encoding the other AAV genes, namely rep and cap, but lacking ITR sequences. The cell line is also infected with adenovirus as a helper. The helper virus promotes replication of the AAV vector and expression of AAV genes from the helper plasmid. The helper plasmid is not packaged in significant amounts due to a lack of ITR sequences. Contamination with adenovirus can be reduced by, e.g., heat treatment to which adenovirus is more sensitive than AAV. Additionally, AAV can be produced at clinical scale using baculovirus systems (see U.S. Pat. No. 7,479,554).

[0162] In many gene therapy applications, it is desirable that the gene therapy vector be delivered with a high degree of specificity to a particular tissue type. Accordingly, a viral vector can be modified to have specificity for a given cell type by expressing a ligand as a fusion protein with a viral coat protein on the outer surface of the virus. The ligand is chosen to have affinity for a receptor known to be present on the cell type of interest. For example, Han et al. (1995) Proc. Natl. Acad. Sci. USA 92:9747-9751, reported that Moloney murine leukemia virus can be modified to express human heregulin fused to gp70, and the recombinant virus infects certain human breast cancer cells expressing human epidermal growth factor receptor. This principle can be extended to other virus-target cell pairs, in which the target cell expresses a receptor and the virus expresses a fusion protein comprising a ligand for the cell-surface receptor. For example, filamentous phage can be engineered to display antibody fragments (e.g., FAB or Fv) having specific binding affinity for virtually any chosen cellular receptor. Although the above description applies primarily to viral vectors, the same principles can be applied to nonviral vectors. Such vectors can be engineered to contain specific uptake sequences which favor uptake by specific target cells.

[0163] Gene therapy vectors can be delivered in vivo by administration to an individual patient, typically by systemic administration (e.g., intravitreal, intravenous, intraperitoneal, intramuscular, subdermal, or intracranial infusion) or topical application, as described below. Alternatively, vectors can be delivered to cells ex vivo, such as cells explanted from an individual patient (e.g., lymphocytes, bone marrow aspirates, tissue biopsy) or universal donor hematopoietic stem cells, followed by reimplantation of the cells into a patient, usually after selection for cells which have incorporated the vector.

[0164] Ex vivo cell transfection for diagnostics, research, or for gene therapy (e.g., via re-infusion of the transfected cells into the host organism) is well known to those of skill in the art. In a preferred embodiment, cells are isolated from the subject organism, transfected with a nucleic acid composition, and re-infused back into the subject organism (e.g., patient). Various cell types suitable for ex vivo transfection are well known to those of skill in the art (See, e.g., Freshney et al. (1994) Culture of Animal Cells, A Manual of Basic Technique, 3rd ed, and the references cited therein for a discussion of how to isolate and culture cells from patients).

[0165] Suitable cells include, but are not limited to, eukaryotic cells and/or cell lines. Non-limiting examples of such cells or cell lines generated from such cells include COS, CHO (e.g., CHO--S, CHO-K1, CHO-DG44, CHO-DUXB11, CHO-DUKX, CHOKISV), VERO, MDCK, WI38, V79, B14AF28-G3, BHK, HaK, NSO, SP2/0-Ag14, HeLa, HEK293 (e.g., HEK293-F, HEK293-H, HEK293-T), perC6 cells, any plant cell (differentiated or undifferentiated), as well as insect cells such as Spodopterafugiperda (Sf), or fungal cells such as Saccharomyces, Pichia and Schizosaccharomyces. In certain embodiments, the cell line is a CHO-K1, MDCK or HEK293 cell line. Additionally, primary cells may be isolated and used ex vivo for reintroduction into the subject to be treated following treatment with a guided nuclease system (e.g. CRISPR/Cas). Suitable primary cells include peripheral blood mononuclear cells (PBMC), and other blood cell subsets such as, but not limited to, CD4+ T cells or CD8+ T cells. Suitable cells also include stem cells such as, by way of example, embryonic stem cells, induced pluripotent stem cells, hematopoietic stem cells (CD34+), neuronal stem cells and mesenchymal stem cells.

[0166] In one embodiment, stem cells are used in ex vivo procedures for cell transfection and gene therapy. The advantage to using stem cells is that they can be differentiated into other cell types in vitro, or can be introduced into a mammal (such as the donor of the cells) where they will engraft in the bone marrow. Methods for differentiating CD34+ cells in vitro into clinically important immune cell types using cytokines such a GM-CSF, IFN-gamma, and TNF-alpha are known (as a non-limiting example see, Inaba et al., J. Exp. Med. 176:1693-1702 (1992)).

[0167] Stem cells are isolated for transduction and differentiation using known methods. For example, stem cells are isolated from bone marrow cells by panning the bone marrow cells with antibodies which bind unwanted cells, such as CD4+ and CD8+ (T cells), CD45+ (panB cells), GR-1 (granulocytes), and Iad (differentiated antigen presenting cells) (as a non-limiting example see Inaba et al. (1992) J. Exp. Med. 176:1693-1702). Stem cells that have been modified may also be used in some embodiments.

[0168] Any one of the RNA molecule compositions described herein is suitable for genome editing in post-mitotic cells or any cell which is not actively dividing, e.g., arrested cells. Examples of post-mitotic cells which may be edited using an RNA molecule composition of the present invention include, but are not limited to, a hepatocyte cell.

[0169] Vectors (e.g., retroviruses, liposomes, etc.) containing therapeutic nucleic acid compositions can also be administered directly to an organism for transduction of cells in vivo. Administration is by any of the routes normally used for introducing a molecule into ultimate contact with blood or tissue cells including, but not limited to, injection, infusion, topical application (e.g., eye drops and cream) and electroporation. Suitable methods of administering such nucleic acids are available and well known to those of skill in the art, and, although more than one route can be used to administer a particular composition, a particular route can often provide a more immediate and more effective reaction than another route. According to some embodiments, the composition is delivered via IV injection.

[0170] Vectors suitable for introduction of transgenes into immune cells (e.g., T-cells) include non-integrating lentivirus vectors. See, e.g., U.S. Patent Publication No. 2009-0117617.

[0171] Pharmaceutically acceptable carriers are determined in part by the particular composition being administered, as well as by the particular method used to administer the composition. Accordingly, there is a wide variety of suitable formulations of pharmaceutical compositions available, as described below (See, e.g., Remington's Pharmaceutical Sciences, 17th ed., 1989).

[0172] In accordance with some embodiments, there is provided an RNA molecule which binds to/associates with and/or directs the RNA guided DNA nuclease to a sequence comprising at least one nucleotide which differs between a mutated allele and a functional allele (e.g., SNP) of a gene of interest (i.e., a sequence of the mutated allele which is not present in the functional allele). The sequence may be within the disease associated mutation. The sequence may be upstream or downstream to the disease associated mutation. Any sequence difference between the mutated allele and the functional allele may be targeted by an RNA molecule of the present invention to inactivate the mutant allele, or otherwise disable its dominant disease-causing effects, while preserving the activity of the functional allele.

[0173] The disclosed compositions and methods may also be used in the manufacture of a medicament for treating dominant genetic disorders in a patient.

### Mechanisms of Action for Several Embodiments Disclosed Herein

[0174] The FGA gene encodes the fibrinogen alpha subunit of the coagulation factor fibrinogen, which is a component of blood clots produced by the liver. Fibrinogen is produced from three homologous polypeptide chains, α, β and γ, which assemble to form a 340 kDa hexameric structure (αβγ)2 held together by 29 disulfide bonds. In the endoplasmic reticulum (ER), the signal peptide from each of the three chains (19 amino acids for α, 30 for β and 26 for γ) is co-translationally removed and later in the secretory pathway the last 15 residues of a are removed by a furin-like protease. Assembly of two copies of each of the three chains results in the formation of a symmetrical hexamer, with a central E domain connected by three-stranded coiled-coils to two peripheral D domains. The D domains consist of the globular C-termini of the β and γ chains and of a portion of the coiled-coils. Once the soluble hexamer has reached the circulation, fibrin is produced by proteolytic cleavage of the fibrinogen alpha and beta chains by thrombin, thus releasing fibrinopeptides A and B and allowing polymerization to occur.

[0175] FGA encodes for two alternative isoforms a short isoform which contains 5 exons—NM_021871 645aa and a long isoform which contains 6 exons—NM_000508 868aa. A missense mutation in exon 5 of the FGA gene (Glu545Val) leads to misfolding of fibrinogen and the deposition of mutant FGA amyloid, primarily in kidneys which is associated with Fibrinogen amyloidosis (AFib).

[0176] Without being bound by any theory or mechanism, the instant invention may be utilized to apply a CRISPR nuclease to process the mutated pathogenic FGA allele and not the functional FGA allele, such as to prevent expression of the mutated pathogenic allele or to produce a truncated non-pathogenic peptide from the mutated pathogenic allele, in order to prevent Fibrinogen amyloidosis (AFib).

[0177] In some embodiments, particularly those targeting exon 1 of the FGA gene, the resultant peptide will lack a portion of the coiled coil domain essential for assembly and the signal peptide essential for secretion.

[0178] Outcomes of the embodiments disclosed herein may be examined to identify whether the mutated allele is expressed. In case the mutated allele is expressed, its effect on cells, such as induced stress/toxicity, may be examined by the creation of amyloid fibrils. Further its ability to assemble peptides into fibrinogen hexamers, and thereby secrete fibrils from cells, may be assessed, inter alia, by the presence of fibrinogen aggregates and amyloid fibrils outside the cells. In addition, residual activity of a resultant truncated alpha subunit and/or fibrinogen, including the truncated alpha subunit, may be assessed.

### Examples of RNA Guide Sequences Which Specifically Target Mutated Alleles of FGA Gene

[0179] Although a large number of guide sequences can be designed to target a mutated allele, the nucleotide sequences described in Tables 2 identified by SEQ ID NOs: 1-1984 below were specifically selected to effectively implement the methods set forth herein and to effectively discriminate between alleles.

[0180] Referring to columns 1-4, each of SEQ ID NOs. 1-1984 indicated in column 1 corresponds to an engineered guide sequence. The corresponding SNP details are indicated in column 2. The SNP details indicated in the 2nd column include the assigned identifier for each SNP corresponding to a SNP ID indicated in Table 1. Column 3 indicates whether the target of each guide sequence is the FGA gene polymorph or wild type sequence. Column 4 indicates the guanine-cytosine content of each guide sequence.

[0181] Table 2 shows guide sequences designed for use as described in the embodiments above to associate with different SNPs within a sequence of a mutated FGA allele. Each engineered guide molecule is further designed such as to associate with a target genomic DNA sequence of interest that lies next to a protospacer adjacent motif (PAM), e.g., a PAM matching the sequence NGG or NAG, where “N” is any nucleobase. The guide sequences were designed to work in conjunction with one or more different CRISPR nucleases, including, but not limited to, e.g. SpCas9WT (PAM SEQ: NGG), SpCas9.VQR.1 (PAM SEQ: NGAN), SpCas9.VQR.2 (PAM SEQ: NGNG), SpCas9.EQR (PAM SEQ: NGAG), SpCas9.VRER (PAM SEQ: NGCG), SaCas9WT (PAM SEQ: NNGRRT), NmCas9WT (PAM SEQ: NNNNGATT), Cpf1 (PAM SEQ: TTTV), or JeCas9WT (PAM SEQ: NNNVRYM). RNA molecules of the present invention are each designed to form complexes in conjunction with one or more different CRISPR nucleases and designed to target polynucleotide sequences of interest utilizing one or more different PAM sequences respective to the CRISPR nuclease utilized.

TABLE 2
Guide sequences designed to associate
with specific SNPs of the FGA gene

| SEQ | | | |
|---|---|---|---|
| ID | SNP ID | Target | |
| NO: | (Table 1) | (SNP/WT) | % GC |
| 1 | s1 | BOTH | 0.35 |
| 2 | s1 | BOTH | 0.45 |
| 3 | s1 | BOTH | 0.45 |
| 4 | s1 | BOTH | 0.45 |
| 5 | s2 | BOTH | 0.5 |
| 6 | s2 | BOTH | 0.5 |
| 7 | s2 | BOTH | 0.45 |
| 8 | s5 | BOTH | 0.35 |
| 9 | s3 | BOTH | 0.25 |
| 10 | s5 | BOTH | 0.3 |
| 11 | s3 | BOTH | 0.25 |
| 12 | s3 | BOTH | 0.25 |
| 13 | s6 | BOTH | 0.3 |
| 14 | s7 | BOTH | 0.55 |
| 15 | s7 | BOTH | 0.45 |
| 16 | s7 | BOTH | 0.45 |
| 17 | s7 | BOTH | 0.6 |
| 18 | s8 | BOTH | 0.4 |
| 19 | s8 | BOTH | 0.45 |
| 20 | s8 | BOTH | 0.45 |
| 21 | s8 | BOTH | 0.45 |
| 22 | s8 | BOTH | 0.45 |
| 23 | s8 | BOTH | 0.45 |
| 24 | s8 | BOTH | 0.45 |
| 25 | s8 | BOTH | 0.4 |
| 26 | s8 | BOTH | 0.45 |
| 27 | s8 | BOTH | 0.4 |
| 28 | s8 | BOTH | 0.45 |
| 29 | s8 | BOTH | 0.4 |
| 30 | s8 | BOTH | 0.4 |
| 31 | s9 | BOTH | 0.4 |
| 32 | s9 | BOTH | 0.5 |
| 33 | s9 | BOTH | 0.45 |
| 34 | s10 | BOTH | 0.45 |
| 35 | s10 | BOTH | 0.5 |
| 36 | s10 | BOTH | 0.7 |
| 37 | s11 | BOTH | 0.5 |
| 38 | s11 | BOTH | 0.45 |
| 39 | s11 | BOTH | 0.45 |
| 40 | s12 | BOTH | 0.45 |
| 41 | s13 | BOTH | 0.65 |
| 42 | s14 | BOTH | 0.55 |
| 43 | s15 | BOTH | 0.25 |
| 44 | s16 | BOTH | 0.3 |
| 45 | s16 | BOTH | 0.35 |
| 46 | s16 | BOTH | 0.35 |
| 47 | s17 | BOTH | 0.3 |
| 48 | s17 | BOTH | 0.3 |
| 49 | s17 | BOTH | 0.25 |
| 50 | s18 | BOTH | 0.5 |
| 51 | s19 | BOTH | 0.45 |
| 52 | s19 | BOTH | 0.55 |
| 53 | s19 | BOTH | 0.5 |
| 54 | s20 | BOTH | 0.5 |
| 55 | s20 | BOTH | 0.5 |
| 56 | s21 | BOTH | 0.55 |
| 57 | s21 | BOTH | 0.5 |
| 58 | s21 | BOTH | 0.55 |
| 59 | s22 | BOTH | 0.4 |
| 60 | s22 | BOTH | 0.45 |
| 61 | s22 | BOTH | 0.4 |
| 62 | s23 | BOTH | 0.45 |
| 63 | s23 | BOTH | 0.4 |
| 64 | s19 | WT | 0.55 |
| 65 | s19 | SNP | 0.55 |
| 66 | s19 | WT | 0.6 |
| 67 | s19 | SNP | 0.6 |
| 68 | s19 | SNP | 0.6 |
| 69 | s19 | WT | 0.6 |
| 70 | s19 | WT | 0.55 |
| 71 | s19 | SNP | 0.6 |
| 72 | s19 | WT | 0.6 |
| 73 | s19 | WT | 0.5 |
| 74 | s19 | SNP | 0.5 |
| 75 | s19 | SNP | 0.55 |
| 76 | s19 | WT | 0.55 |
| 77 | s19 | SNP | 0.55 |
| 78 | s19 | WT | 0.45 |
| 79 | s19 | SNP | 0.45 |
| 80 | s19 | WT | 0.45 |
| 81 | s19 | SNP | 0.45 |
| 82 | s5 | SNP | 0.35 |
| 83 | s5 | SNP | 0.3 |
| 84 | s5 | WT | 0.35 |
| 85 | s3 | WT | 0.25 |
| 86 | s3 | SNP | 0.25 |
| 87 | s5 | WT | 0.4 |
| 88 | s3 | SNP | 0.25 |
| 89 | s3 | WT | 0.25 |
| 90 | s4 | SNP | 0.2 |
| 91 | s4 | WT | 0.25 |
| 92 | s5 | SNP | 0.3 |
| 93 | s5 | WT | 0.35 |
| 94 | s4 | WT | 0.25 |
| 95 | s4 | SNP | 0.2 |
| 96 | s4 | SNP | 0.2 |
| 97 | s4 | WT | 0.25 |
| 98 | s4 | WT | 0.25 |
| 99 | s4 | SNP | 0.2 |
| 100 | s4 | WT | 0.25 |
| 101 | s4 | SNP | 0.2 |
| 102 | s4 | SNP | 0.2 |
| 103 | s4 | WT | 0.25 |
| 104 | s5 | SNP | 0.3 |
| 105 | s5 | WT | 0.35 |
| 106 | s4 | SNP | 0.2 |
| 107 | s4 | WT | 0.25 |
| 108 | s6 | SNP | 0.3 |
| 109 | s6 | WT | 0.25 |
| 110 | s6 | SNP | 0.3 |
| 111 | s6 | SNP | 0.35 |
| 112 | s6 | WT | 0.3 |
| 113 | s6 | SNP | 0.25 |
| 114 | s6 | WT | 0.2 |
| 115 | s6 | WT | 0.25 |
| 116 | s7 | WT | 0.4 |
| 117 | s7 | WT | 0.45 |
| 118 | s7 | SNP | 0.5 |
| 119 | s7 | SNP | 0.6 |
| 120 | s7 | WT | 0.55 |
| 121 | s7 | SNP | 0.45 |
| 122 | s13 | WT | 0.5 |
| 123 | s13 | SNP | 0.55 |
| 124 | s13 | WT | 0.55 |
| 125 | s13 | SNP | 0.6 |
| 126 | s13 | WT | 0.5 |
| 127 | s13 | SNP | 0.55 |
| 128 | s13 | SNP | 0.5 |
| 129 | s13 | WT | 0.45 |
| 130 | s13 | SNP | 0.6 |
| 131 | s13 | WT | 0.55 |
| 132 | s13 | WT | 0.55 |
| 133 | s13 | SNP | 0.6 |
| 134 | s13 | WT | 0.55 |
| 135 | s13 | SNP | 0.6 |
| 136 | s13 | WT | 0.5 |
| 137 | s13 | SNP | 0.55 |
| 138 | s13 | WT | 0.5 |
| 139 | s13 | SNP | 0.55 |
| 140 | s13 | SNP | 0.55 |
| 141 | s13 | WT | 0.5 |
| 142 | s14 | WT | 0.6 |
| 143 | s14 | SNP | 0.55 |
| 144 | s14 | WT | 0.5 |
| 145 | s14 | SNP | 0.45 |
| 146 | s14 | SNP | 0.6 |
| 147 | s14 | WT | 0.65 |
| 148 | s14 | SNP | 0.55 |
| 149 | s14 | WT | 0.6 |
| 150 | s14 | WT | 0.6 |
| 151 | s14 | WT | 0.6 |
| 152 | s14 | SNP | 0.55 |
| 153 | s14 | SNP | 0.55 |
| 154 | s14 | SNP | 0.55 |
| 155 | s14 | WT | 0.6 |
| 156 | s14 | SNP | 0.5 |
| 157 | s14 | WT | 0.55 |
| 158 | s14 | WT | 0.55 |
| 159 | s14 | SNP | 0.5 |
| 160 | s15 | SNP | 0.2 |
| 161 | s15 | WT | 0.25 |
| 162 | s15 | WT | 0.25 |
| 163 | s15 | SNP | 0.2 |
| 164 | s15 | SNP | 0.25 |
| 165 | s15 | WT | 0.3 |
| 166 | s15 | WT | 0.2 |
| 167 | s15 | WT | 0.25 |
| 168 | s15 | SNP | 0.2 |
| 169 | s16 | WT | 0.5 |
| 170 | s16 | SNP | 0.45 |
| 171 | s16 | SNP | 0.35 |
| 172 | s16 | WT | 0.4 |
| 173 | s16 | SNP | 0.4 |
| 174 | s16 | WT | 0.45 |
| 175 | s16 | WT | 0.5 |
| 176 | s16 | SNP | 0.45 |
| 177 | s16 | SNP | 0.4 |
| 178 | s16 | WT | 0.45 |
| 179 | s16 | SNP | 0.4 |
| 180 | s16 | WT | 0.45 |
| 181 | s16 | SNP | 0.3 |
| 182 | s16 | WT | 0.35 |
| 183 | s16 | WT | 0.4 |
| 184 | s16 | SNP | 0.35 |
| 185 | s17 | WT | 0.35 |
| 186 | s17 | SNP | 0.3 |
| 187 | s17 | WT | 0.35 |
| 188 | s17 | SNP | 0.3 |
| 189 | s17 | SNP | 0.3 |
| 190 | s17 | WT | 0.35 |
| 191 | s17 | WT | 0.5 |
| 192 | s17 | SNP | 0.45 |
| 193 | s17 | SNP | 0.3 |
| 194 | s17 | WT | 0.35 |
| 195 | s18 | WT | 0.4 |
| 196 | s18 | SNP | 0.4 |
| 197 | s18 | WT | 0.35 |
| 198 | s18 | SNP | 0.4 |
| 199 | s18 | WT | 0.35 |
| 200 | s18 | SNP | 0.45 |
| 201 | s18 | SNP | 0.45 |
| 202 | s18 | WT | 0.4 |
| 203 | s18 | SNP | 0.45 |
| 204 | s18 | WT | 0.4 |
| 205 | s18 | WT | 0.4 |
| 206 | s18 | SNP | 0.45 |
| 207 | s18 | WT | 0.35 |
| 208 | s18 | SNP | 0.4 |
| 209 | s18 | WT | 0.35 |
| 210 | s18 | SNP | 0.4 |
| 211 | s18 | WT | 0.4 |
| 212 | s18 | SNP | 0.45 |
| 213 | s18 | SNP | 0.45 |
| 214 | s18 | WT | 0.4 |
| 215 | s18 | WT | 0.4 |
| 216 | s18 | SNP | 0.45 |
| 217 | s20 | SNP | 0.45 |
| 218 | s20 | SNP | 0.35 |
| 219 | s20 | WT | 0.4 |
| 220 | s20 | WT | 0.4 |
| 221 | s20 | SNP | 0.35 |
| 222 | s20 | WT | 0.4 |
| 223 | s20 | SNP | 0.35 |
| 224 | s20 | SNP | 0.4 |
| 225 | s20 | WT | 0.45 |
| 226 | s20 | WT | 0.45 |
| 227 | s20 | WT | 0.5 |
| 228 | s20 | WT | 0.5 |
| 229 | s20 | SNP | 0.45 |
| 230 | s20 | WT | 0.45 |
| 231 | s20 | SNP | 0.4 |
| 232 | s20 | WT | 0.4 |
| 233 | s20 | SNP | 0.35 |
| 234 | s20 | SNP | 0.35 |
| 235 | s20 | WT | 0.4 |
| 236 | s20 | SNP | 0.4 |
| 237 | s20 | WT | 0.45 |
| 238 | s20 | WT | 0.45 |
| 239 | s20 | WT | 0.4 |
| 240 | s20 | SNP | 0.35 |
| 241 | s20 | WT | 0.4 |
| 242 | s20 | SNP | 0.35 |
| 243 | s20 | SNP | 0.35 |
| 244 | s20 | WT | 0.4 |
| 245 | s20 | SNP | 0.4 |
| 246 | s20 | SNP | 0.35 |
| 247 | s20 | WT | 0.4 |
| 248 | s20 | WT | 0.4 |
| 249 | s20 | SNP | 0.4 |
| 250 | s20 | SNP | 0.35 |
| 251 | s20 | WT | 0.4 |
| 252 | s1 | WT | 0.45 |
| 253 | s1 | SNP | 0.45 |
| 254 | s1 | WT | 0.5 |
| 255 | s1 | SNP | 0.4 |
| 256 | s1 | WT | 0.45 |
| 257 | s1 | SNP | 0.4 |
| 258 | s1 | WT | 0.45 |
| 259 | s1 | SNP | 0.4 |
| 260 | s1 | WT | 0.45 |
| 261 | s1 | SNP | 0.4 |
| 262 | s1 | WT | 0.45 |
| 263 | s1 | SNP | 0.4 |
| 264 | s1 | WT | 0.45 |
| 265 | s1 | SNP | 0.35 |
| 266 | s1 | WT | 0.4 |
| 267 | s1 | SNP | 0.4 |
| 268 | s1 | WT | 0.45 |
| 269 | s1 | SNP | 0.4 |
| 270 | s2 | SNP | 0.35 |
| 271 | s2 | WT | 0.4 |
| 272 | s2 | SNP | 0.45 |
| 273 | s2 | WT | 0.5 |
| 274 | s2 | SNP | 0.4 |
| 275 | s2 | WT | 0.45 |
| 276 | s2 | SNP | 0.4 |
| 277 | s2 | WT | 0.45 |
| 278 | s2 | WT | 0.45 |
| 279 | s2 | SNP | 0.4 |
| 280 | s2 | WT | 0.6 |
| 281 | s2 | SNP | 0.55 |
| 282 | s2 | WT | 0.5 |
| 283 | s2 | SNP | 0.45 |
| 284 | s2 | WT | 0.45 |
| 285 | s2 | SNP | 0.4 |
| 286 | s2 | WT | 0.55 |
| 287 | s2 | SNP | 0.5 |
| 288 | s9 | WT | 0.5 |
| 289 | s9 | SNP | 0.45 |
| 290 | s9 | WT | 0.5 |
| 291 | s9 | WT | 0.55 |
| 292 | s9 | SNP | 0.5 |
| 293 | s9 | SNP | 0.45 |
| 294 | s9 | WT | 0.5 |
| 295 | s9 | WT | 0.55 |
| 296 | s9 | SNP | 0.5 |
| 297 | s9 | WT | 0.5 |
| 298 | s9 | SNP | 0.45 |
| 299 | s9 | WT | 0.5 |
| 300 | s9 | SNP | 0.45 |
| 301 | s9 | WT | 0.45 |
| 302 | s9 | SNP | 0.45 |
| 303 | s9 | SNP | 0.4 |
| 304 | s10 | SNP | 0.5 |
| 305 | s10 | WT | 0.55 |
| 306 | s10 | SNP | 0.55 |
| 307 | s10 | WT | 0.6 |
| 308 | s10 | WT | 0.55 |
| 309 | s10 | SNP | 0.5 |
| 310 | s11 | WT | 0.4 |
| 311 | s11 | SNP | 0.35 |
| 312 | s11 | SNP | 0.3 |
| 313 | s11 | WT | 0.35 |
| 314 | s11 | WT | 0.35 |
| 315 | s11 | SNP | 0.3 |
| 316 | s11 | WT | 0.35 |
| 317 | s11 | SNP | 0.3 |
| 318 | s11 | WT | 0.4 |
| 319 | s11 | SNP | 0.35 |
| 320 | s11 | WT | 0.5 |
| 321 | s11 | WT | 0.4 |
| 322 | s11 | SNP | 0.35 |
| 323 | s11 | SNP | 0.3 |
| 324 | s11 | WT | 0.35 |
| 325 | s11 | WT | 0.45 |
| 326 | s11 | SNP | 0.4 |
| 327 | s11 | WT | 0.5 |
| 328 | s11 | SNP | 0.45 |
| 329 | s11 | SNP | 0.45 |
| 330 | s12 | SNP | 0.5 |
| 331 | s12 | WT | 0.45 |
| 332 | s12 | SNP | 0.5 |
| 333 | s12 | SNP | 0.5 |
| 334 | s12 | WT | 0.45 |
| 335 | s12 | WT | 0.5 |
| 336 | s12 | WT | 0.4 |
| 337 | s12 | SNP | 0.45 |
| 338 | s12 | WT | 0.45 |
| 339 | s12 | SNP | 0.55 |
| 340 | s21 | WT | 0.7 |
| 341 | s21 | SNP | 0.65 |
| 342 | s21 | WT | 0.6 |
| 343 | s21 | SNP | 0.6 |
| 344 | s21 | WT | 0.65 |
| 345 | s21 | SNP | 0.55 |
| 346 | s21 | WT | 0.6 |
| 347 | s21 | WT | 0.6 |
| 348 | s21 | SNP | 0.55 |
| 349 | s21 | SNP | 0.55 |
| 350 | s21 | WT | 0.6 |
| 351 | s21 | SNP | 0.65 |
| 352 | s21 | WT | 0.7 |
| 353 | s21 | SNP | 0.55 |
| 354 | s21 | SNP | 0.55 |
| 355 | s21 | WT | 0.6 |
| 356 | s21 | WT | 0.6 |
| 357 | s21 | SNP | 0.65 |
| 358 | s21 | WT | 0.7 |
| 359 | s21 | WT | 0.7 |
| 360 | s21 | SNP | 0.65 |
| 361 | s21 | WT | 0.6 |
| 362 | s21 | SNP | 0.55 |
| 363 | s21 | SNP | 0.55 |
| 364 | s21 | WT | 0.55 |
| 365 | s21 | SNP | 0.5 |
| 366 | s21 | SNP | 0.6 |
| 367 | s21 | WT | 0.65 |
| 368 | s22 | WT | 0.4 |
| 369 | s22 | SNP | 0.35 |
| 370 | s22 | WT | 0.45 |
| 371 | s22 | SNP | 0.4 |
| 372 | s22 | WT | 0.45 |
| 373 | s22 | SNP | 0.4 |
| 374 | s22 | WT | 0.45 |
| 375 | s22 | SNP | 0.3 |
| 376 | s22 | WT | 0.35 |
| 377 | s22 | SNP | 0.4 |
| 378 | s22 | SNP | 0.4 |
| 379 | s22 | WT | 0.45 |
| 380 | s22 | SNP | 0.3 |
| 381 | s22 | WT | 0.35 |
| 382 | s22 | SNP | 0.4 |
| 383 | s22 | WT | 0.45 |
| 384 | s22 | SNP | 0.3 |
| 385 | s22 | WT | 0.35 |
| 386 | s23 | SNP | 0.4 |
| 387 | s23 | SNP | 0.4 |
| 388 | s23 | WT | 0.4 |
| 389 | s23 | WT | 0.4 |
| 390 | s23 | SNP | 0.35 |
| 391 | s23 | WT | 0.35 |
| 392 | s23 | SNP | 0.4 |
| 393 | s23 | WT | 0.4 |
| 394 | s23 | WT | 0.4 |
| 395 | s23 | SNP | 0.4 |
| 396 | s23 | SNP | 0.5 |
| 397 | s23 | WT | 0.5 |
| 398 | s23 | WT | 0.5 |
| 399 | s23 | SNP | 0.5 |
| 400 | s23 | SNP | 0.45 |
| 401 | s23 | SNP | 0.4 |
| 402 | s23 | WT | 0.4 |
| 403 | s23 | WT | 0.45 |
| 404 | s23 | SNP | 0.4 |
| 405 | s23 | WT | 0.4 |
| 406 | s23 | SNP | 0.4 |
| 407 | s23 | WT | 0.4 |
| 408 | s23 | WT | 0.4 |
| 409 | s23 | SNP | 0.4 |
| 410 | s1 | BOTH | 0.45 |
| 411 | s1 | BOTH | 0.4 |
| 412 | s1 | BOTH | 0.45 |
| 413 | s1 | BOTH | 0.4 |
| 414 | s2 | BOTH | 0.4 |
| 415 | s2 | BOTH | 0.4 |
| 416 | s2 | BOTH | 0.45 |
| 417 | s2 | BOTH | 0.5 |
| 418 | s2 | BOTH | 0.4 |
| 419 | s3 | BOTH | 0.3 |
| 420 | s4 | BOTH | 0.25 |
| 421 | s5 | BOTH | 0.3 |
| 422 | s5 | BOTH | 0.4 |
| 423 | s4 | BOTH | 0.25 |
| 424 | s3 | BOTH | 0.25 |
| 425 | s4 | BOTH | 0.15 |
| 426 | s5 | BOTH | 0.4 |
| 427 | s3 | BOTH | 0.3 |
| 428 | s5 | BOTH | 0.45 |
| 429 | s4 | BOTH | 0.3 |
| 430 | s5 | BOTH | 0.45 |
| 431 | s4 | BOTH | 0.3 |
| 432 | s5 | BOTH | 0.35 |
| 433 | s3 | BOTH | 0.25 |
| 434 | s4 | BOTH | 0.15 |
| 435 | s4 | BOTH | 0.15 |
| 436 | s4 | BOTH | 0.15 |
| 437 | s3 | BOTH | 0.25 |
| 438 | s6 | BOTH | 0.25 |
| 439 | s6 | BOTH | 0.35 |
| 440 | s6 | BOTH | 0.3 |
| 441 | s6 | BOTH | 0.3 |
| 442 | s6 | BOTH | 0.35 |
| 443 | s6 | BOTH | 0.35 |
| 444 | s6 | BOTH | 0.3 |
| 445 | s7 | BOTH | 0.45 |
| 446 | s7 | BOTH | 0.45 |
| 447 | s7 | BOTH | 0.5 |
| 448 | s7 | BOTH | 0.4 |
| 449 | s8 | BOTH | 0.5 |
| 450 | s8 | BOTH | 0.5 |
| 451 | s8 | BOTH | 0.5 |
| 452 | s8 | BOTH | 0.4 |
| 453 | s8 | BOTH | 0.5 |
| 454 | s8 | BOTH | 0.45 |
| 455 | s8 | BOTH | 0.5 |
| 456 | s8 | BOTH | 0.5 |
| 457 | s8 | BOTH | 0.4 |
| 458 | s8 | BOTH | 0.45 |
| 459 | s8 | BOTH | 0.45 |
| 460 | s8 | BOTH | 0.45 |
| 461 | s8 | BOTH | 0.45 |
| 462 | s8 | BOTH | 0.4 |
| 463 | s8 | BOTH | 0.4 |
| 464 | s8 | BOTH | 0.5 |
| 465 | s8 | BOTH | 0.5 |
| 466 | s8 | BOTH | 0.5 |
| 467 | s8 | BOTH | 0.45 |
| 468 | s8 | BOTH | 0.55 |
| 469 | s8 | BOTH | 0.5 |
| 470 | s8 | BOTH | 0.6 |
| 471 | s8 | BOTH | 0.5 |
| 472 | s8 | BOTH | 0.45 |
| 473 | s8 | BOTH | 0.4 |
| 474 | s8 | BOTH | 0.4 |
| 475 | s8 | BOTH | 0.45 |
| 476 | s8 | BOTH | 0.4 |
| 477 | s8 | BOTH | 0.4 |
| 478 | s8 | BOTH | 0.5 |
| 479 | s8 | BOTH | 0.45 |
| 480 | s8 | BOTH | 0.4 |
| 481 | s8 | BOTH | 0.45 |
| 482 | s8 | BOTH | 0.45 |
| 483 | s8 | BOTH | 0.4 |
| 484 | s9 | BOTH | 0.45 |
| 485 | s9 | BOTH | 0.45 |
| 486 | s9 | BOTH | 0.45 |
| 487 | s9 | BOTH | 0.4 |
| 488 | s9 | BOTH | 0.45 |
| 489 | s10 | BOTH | 0.5 |
| 490 | s10 | BOTH | 0.45 |
| 491 | s10 | BOTH | 0.65 |
| 492 | s10 | BOTH | 0.65 |
| 493 | s10 | BOTH | 0.75 |
| 494 | s11 | BOTH | 0.25 |
| 495 | s11 | BOTH | 0.5 |
| 496 | s11 | BOTH | 0.25 |
| 497 | s11 | BOTH | 0.3 |
| 498 | s11 | BOTH | 0.25 |
| 499 | s12 | BOTH | 0.45 |
| 500 | s12 | BOTH | 0.5 |
| 501 | s12 | BOTH | 0.5 |
| 502 | s12 | BOTH | 0.5 |
| 503 | s12 | BOTH | 0.5 |
| 504 | s12 | BOTH | 0.5 |
| 505 | s12 | BOTH | 0.45 |
| 506 | s13 | BOTH | 0.6 |
| 507 | s13 | BOTH | 0.6 |
| 508 | s13 | BOTH | 0.6 |
| 509 | s13 | BOTH | 0.6 |
| 510 | s13 | BOTH | 0.65 |
| 511 | s13 | BOTH | 0.55 |
| 512 | s13 | BOTH | 0.6 |
| 513 | s14 | BOTH | 0.5 |
| 514 | s14 | BOTH | 0.55 |
| 515 | s14 | BOTH | 0.45 |
| 516 | s14 | BOTH | 0.55 |
| 517 | s14 | BOTH | 0.5 |
| 518 | s14 | BOTH | 0.5 |
| 519 | s14 | BOTH | 0.45 |
| 520 | s15 | BOTH | 0.25 |
| 521 | s15 | BOTH | 0.3 |
| 522 | s15 | BOTH | 0.3 |
| 523 | s15 | BOTH | 0.25 |
| 524 | s15 | BOTH | 0.3 |
| 525 | s15 | BOTH | 0.25 |
| 526 | s15 | BOTH | 0.25 |
| 527 | s16 | BOTH | 0.4 |
| 528 | s16 | BOTH | 0.45 |
| 529 | s16 | BOTH | 0.45 |
| 530 | s16 | BOTH | 0.4 |
| 531 | s16 | BOTH | 0.35 |
| 532 | s17 | BOTH | 0.2 |
| 533 | s17 | BOTH | 0.35 |
| 534 | s17 | BOTH | 0.3 |
| 535 | s17 | BOTH | 0.25 |
| 536 | s17 | BOTH | 0.3 |
| 537 | s18 | BOTH | 0.5 |
| 538 | s18 | BOTH | 0.5 |
| 539 | s18 | BOTH | 0.45 |
| 540 | s18 | BOTH | 0.55 |
| 541 | s18 | BOTH | 0.55 |
| 542 | s18 | BOTH | 0.4 |
| 543 | s18 | BOTH | 0.5 |
| 544 | s19 | BOTH | 0.45 |
| 545 | s19 | BOTH | 0.55 |
| 546 | s19 | BOTH | 0.45 |
| 547 | s19 | BOTH | 0.6 |
| 548 | s19 | BOTH | 0.55 |
| 549 | s20 | BOTH | 0.55 |
| 550 | s20 | BOTH | 0.45 |
| 551 | s20 | BOTH | 0.5 |
| 552 | s20 | BOTH | 0.55 |
| 553 | s20 | BOTH | 0.5 |
| 554 | s20 | BOTH | 0.55 |
| 555 | s21 | BOTH | 0.55 |
| 556 | s21 | BOTH | 0.55 |
| 557 | s21 | BOTH | 0.55 |
| 558 | s21 | BOTH | 0.55 |
| 559 | s21 | BOTH | 0.55 |
| 560 | s22 | BOTH | 0.4 |
| 561 | s22 | BOTH | 0.4 |
| 562 | s22 | BOTH | 0.45 |
| 563 | s22 | BOTH | 0.45 |
| 564 | s22 | BOTH | 0.45 |
| 565 | s23 | BOTH | 0.4 |
| 566 | s23 | BOTH | 0.45 |
| 567 | s23 | BOTH | 0.55 |
| 568 | s23 | BOTH | 0.55 |
| 569 | s23 | BOTH | 0.55 |
| 570 | s23 | BOTH | 0.6 |
| 571 | s19 | SNP | 0.45 |
| 572 | s19 | SNP | 0.45 |
| 573 | s19 | WT | 0.45 |
| 574 | s19 | WT | 0.55 |
| 575 | s19 | SNP | 0.55 |
| 576 | s19 | SNP | 0.45 |
| 577 | s19 | WT | 0.45 |
| 578 | s19 | WT | 0.55 |
| 579 | s19 | SNP | 0.55 |
| 580 | s19 | SNP | 0.5 |
| 581 | s19 | WT | 0.5 |
| 582 | s19 | SNP | 0.55 |
| 583 | s19 | WT | 0.55 |
| 584 | s19 | WT | 0.5 |
| 585 | s19 | WT | 0.55 |
| 586 | s19 | SNP | 0.55 |
| 587 | s19 | WT | 0.45 |
| 588 | s19 | SNP | 0.45 |
| 589 | s19 | SNP | 0.5 |
| 590 | s19 | WT | 0.5 |
| 591 | s19 | SNP | 0.45 |
| 592 | s19 | WT | 0.55 |
| 593 | s19 | SNP | 0.55 |
| 594 | s19 | SNP | 0.55 |
| 595 | s19 | WT | 0.55 |
| 596 | s19 | SNP | 0.55 |
| 597 | s19 | WT | 0.55 |
| 598 | s19 | SNP | 0.5 |
| 599 | s19 | WT | 0.5 |
| 600 | s19 | SNP | 0.5 |
| 601 | s19 | WT | 0.5 |
| 602 | s19 | WT | 0.45 |
| 603 | s19 | SNP | 0.6 |
| 604 | s19 | WT | 0.6 |
| 605 | s19 | SNP | 0.45 |
| 606 | s19 | WT | 0.45 |
| 607 | s19 | WT | 0.6 |
| 608 | s19 | SNP | 0.6 |
| 609 | s19 | WT | 0.45 |
| 610 | s19 | SNP | 0.45 |
| 611 | s19 | SNP | 0.55 |
| 612 | s19 | WT | 0.55 |
| 613 | s19 | WT | 0.6 |
| 614 | s19 | SNP | 0.6 |
| 615 | s19 | WT | 0.45 |
| 616 | s19 | SNP | 0.45 |
| 617 | s19 | SNP | 0.45 |
| 618 | s19 | WT | 0.45 |
| 619 | s19 | WT | 0.45 |
| 620 | s19 | WT | 0.5 |
| 621 | s19 | SNP | 0.5 |
| 622 | s19 | SNP | 0.55 |
| 623 | s19 | WT | 0.55 |
| 624 | s19 | SNP | 0.55 |
| 625 | s19 | WT | 0.55 |
| 626 | s19 | WT | 0.5 |
| 627 | s19 | SNP | 0.5 |
| 628 | s19 | SNP | 0.5 |
| 629 | s19 | SNP | 0.55 |
| 630 | s19 | WT | 0.55 |
| 631 | s19 | WT | 0.45 |
| 632 | s19 | SNP | 0.45 |
| 633 | s4 | SNP | 0.15 |
| 634 | s4 | SNP | 0.2 |
| 635 | s3 | WT | 0.35 |
| 636 | s3 | SNP | 0.35 |
| 637 | s4 | WT | 0.2 |
| 638 | s3 | SNP | 0.35 |
| 639 | s3 | WT | 0.35 |
| 640 | s4 | SNP | 0.2 |
| 641 | s3 | WT | 0.4 |
| 642 | s3 | SNP | 0.4 |
| 643 | s4 | WT | 0.25 |
| 644 | s4 | SNP | 0.2 |
| 645 | s4 | WT | 0.25 |
| 646 | s5 | SNP | 0.35 |
| 647 | s3 | SNP | 0.35 |
| 648 | s3 | WT | 0.35 |
| 649 | s4 | SNP | 0.2 |
| 650 | s5 | WT | 0.35 |
| 651 | s5 | SNP | 0.3 |
| 652 | s3 | WT | 0.4 |
| 653 | s3 | SNP | 0.4 |
| 654 | s3 | WT | 0.35 |
| 655 | s4 | WT | 0.25 |
| 656 | s3 | SNP | 0.35 |
| 657 | s3 | WT | 0.25 |
| 658 | s3 | SNP | 0.25 |
| 659 | s5 | SNP | 0.3 |
| 660 | s5 | WT | 0.35 |
| 661 | s4 | SNP | 0.2 |
| 662 | s4 | WT | 0.25 |
| 663 | s3 | SNP | 0.4 |
| 664 | s3 | WT | 0.4 |
| 665 | s3 | SNP | 0.35 |
| 666 | s3 | WT | 0.35 |
| 667 | s4 | SNP | 0.25 |
| 668 | s5 | SNP | 0.25 |
| 669 | s5 | WT | 0.3 |
| 670 | s5 | SNP | 0.3 |
| 671 | s5 | WT | 0.35 |
| 672 | s5 | WT | 0.35 |
| 673 | s5 | SNP | 0.3 |
| 674 | s3 | WT | 0.4 |
| 675 | s3 | SNP | 0.4 |
| 676 | s3 | WT | 0.35 |
| 677 | s5 | WT | 0.4 |
| 678 | s5 | SNP | 0.35 |
| 679 | s4 | WT | 0.25 |
| 680 | s3 | SNP | 0.35 |
| 681 | s5 | WT | 0.3 |
| 682 | s5 | SNP | 0.25 |
| 683 | s3 | WT | 0.25 |
| 684 | s3 | SNP | 0.25 |
| 685 | s3 | SNP | 0.4 |
| 686 | s3 | WT | 0.4 |
| 687 | s5 | SNP | 0.3 |
| 688 | s5 | WT | 0.35 |
| 689 | s5 | SNP | 0.25 |
| 690 | s5 | WT | 0.3 |
| 691 | s4 | WT | 0.25 |
| 692 | s4 | SNP | 0.2 |
| 693 | s4 | WT | 0.25 |
| 694 | s4 | SNP | 0.2 |
| 695 | s4 | WT | 0.25 |
| 696 | s4 | SNP | 0.2 |
| 697 | s5 | SNP | 0.35 |
| 698 | s5 | WT | 0.4 |
| 699 | s3 | WT | 0.35 |
| 700 | s3 | SNP | 0.35 |
| 701 | s4 | WT | 0.25 |
| 702 | s4 | SNP | 0.2 |
| 703 | s4 | SNP | 0.2 |
| 704 | s4 | WT | 0.25 |
| 705 | s3 | SNP | 0.25 |
| 706 | s3 | WT | 0.25 |
| 707 | s5 | WT | 0.35 |
| 708 | s5 | SNP | 0.3 |
| 709 | s4 | SNP | 0.2 |
| 710 | s4 | WT | 0.25 |
| 711 | s3 | WT | 0.25 |
| 712 | s3 | SNP | 0.25 |
| 713 | s3 | SNP | 0.3 |
| 714 | s3 | WT | 0.3 |
| 715 | s5 | WT | 0.4 |
| 716 | s5 | SNP | 0.25 |
| 717 | s5 | WT | 0.3 |
| 718 | s5 | WT | 0.3 |
| 719 | s5 | SNP | 0.25 |
| 720 | s3 | WT | 0.4 |
| 721 | s3 | SNP | 0.4 |
| 722 | s4 | SNP | 0.25 |
| 723 | s4 | WT | 0.3 |
| 724 | s3 | SNP | 0.25 |
| 725 | s3 | WT | 0.25 |
| 726 | s3 | SNP | 0.4 |
| 727 | s3 | SNP | 0.35 |
| 728 | s3 | WT | 0.4 |
| 729 | s3 | WT | 0.3 |
| 730 | s5 | WT | 0.4 |
| 731 | s5 | SNP | 0.35 |
| 732 | s4 | WT | 0.3 |
| 733 | s4 | SNP | 0.25 |
| 734 | s5 | WT | 0.35 |
| 735 | s4 | SNP | 0.2 |
| 736 | s4 | WT | 0.25 |
| 737 | s5 | SNP | 0.3 |
| 738 | s4 | WT | 0.2 |
| 739 | s5 | SNP | 0.35 |
| 740 | s5 | SNP | 0.3 |
| 741 | s5 | WT | 0.35 |
| 742 | s3 | WT | 0.3 |
| 743 | s3 | SNP | 0.3 |
| 744 | s5 | WT | 0.4 |
| 745 | s5 | SNP | 0.35 |
| 746 | s5 | WT | 0.4 |
| 747 | s3 | SNP | 0.4 |
| 748 | s3 | WT | 0.4 |
| 749 | s5 | SNP | 0.25 |
| 750 | s5 | WT | 0.3 |
| 751 | s4 | WT | 0.25 |
| 752 | s4 | SNP | 0.2 |
| 753 | s4 | WT | 0.3 |
| 754 | s4 | SNP | 0.25 |
| 755 | s3 | SNP | 0.35 |
| 756 | s3 | WT | 0.35 |
| 757 | s5 | SNP | 0.3 |
| 758 | s5 | WT | 0.35 |
| 759 | s5 | WT | 0.35 |
| 760 | s5 | SNP | 0.3 |
| 761 | s3 | WT | 0.4 |
| 762 | s3 | SNP | 0.4 |
| 763 | s3 | WT | 0.35 |
| 764 | s5 | WT | 0.4 |
| 765 | s5 | SNP | 0.35 |
| 766 | s3 | WT | 0.35 |
| 767 | s4 | WT | 0.3 |
| 768 | s3 | SNP | 0.35 |
| 769 | s3 | SNP | 0.3 |
| 770 | s5 | WT | 0.3 |
| 771 | s5 | SNP | 0.25 |
| 772 | s5 | WT | 0.35 |
| 773 | s5 | WT | 0.4 |
| 774 | s5 | SNP | 0.35 |
| 775 | s3 | WT | 0.35 |
| 776 | s3 | SNP | 0.35 |
| 777 | s3 | SNP | 0.3 |
| 778 | s3 | WT | 0.3 |
| 779 | s4 | SNP | 0.2 |
| 780 | s4 | WT | 0.25 |
| 781 | s5 | WT | 0.35 |
| 782 | s5 | SNP | 0.3 |
| 783 | s3 | WT | 0.3 |
| 784 | s3 | SNP | 0.3 |
| 785 | s3 | SNP | 0.4 |
| 786 | s3 | WT | 0.4 |
| 787 | s5 | SNP | 0.3 |
| 788 | s5 | WT | 0.35 |
| 789 | s5 | SNP | 0.3 |
| 790 | s5 | WT | 0.35 |
| 791 | s4 | WT | 0.25 |
| 792 | s4 | SNP | 0.2 |
| 793 | s4 | WT | 0.25 |
| 794 | s4 | WT | 0.25 |
| 795 | s4 | SNP | 0.2 |
| 796 | s4 | SNP | 0.2 |
| 797 | s4 | SNP | 0.15 |
| 798 | s4 | WT | 0.2 |
| 799 | s5 | WT | 0.3 |
| 800 | s5 | SNP | 0.25 |
| 801 | s4 | SNP | 0.2 |
| 802 | s4 | WT | 0.25 |
| 803 | s4 | WT | 0.25 |
| 804 | s4 | WT | 0.25 |
| 805 | s4 | SNP | 0.2 |
| 806 | s5 | WT | 0.35 |
| 807 | s5 | SNP | 0.3 |
| 808 | s4 | SNP | 0.2 |
| 809 | s3 | WT | 0.3 |
| 810 | s3 | SNP | 0.3 |
| 811 | s5 | SNP | 0.35 |
| 812 | s5 | WT | 0.4 |
| 813 | s4 | WT | 0.25 |
| 814 | s4 | SNP | 0.2 |
| 815 | s3 | SNP | 0.35 |
| 816 | s3 | WT | 0.35 |
| 817 | s5 | WT | 0.35 |
| 818 | s5 | WT | 0.4 |
| 819 | s5 | SNP | 0.35 |
| 820 | s3 | WT | 0.35 |
| 821 | s3 | SNP | 0.35 |
| 822 | s4 | WT | 0.25 |
| 823 | s4 | SNP | 0.2 |
| 824 | s3 | SNP | 0.3 |
| 825 | s3 | WT | 0.3 |
| 826 | s4 | SNP | 0.2 |
| 827 | s4 | WT | 0.25 |
| 828 | s4 | SNP | 0.2 |
| 829 | s4 | WT | 0.25 |
| 830 | s5 | SNP | 0.3 |
| 831 | s4 | WT | 0.25 |
| 832 | s4 | SNP | 0.2 |
| 833 | s3 | SNP | 0.35 |
| 834 | s3 | WT | 0.35 |
| 835 | s5 | WT | 0.4 |
| 836 | s5 | SNP | 0.35 |
| 837 | s3 | SNP | 0.25 |
| 838 | s3 | WT | 0.25 |
| 839 | s5 | SNP | 0.3 |
| 840 | s4 | WT | 0.2 |
| 841 | s4 | SNP | 0.15 |
| 842 | s3 | SNP | 0.3 |
| 843 | s3 | WT | 0.3 |
| 844 | s5 | WT | 0.35 |
| 845 | s5 | SNP | 0.3 |
| 846 | s4 | SNP | 0.15 |
| 847 | s6 | WT | 0.25 |
| 848 | s6 | SNP | 0.3 |
| 849 | s6 | WT | 0.3 |
| 850 | s6 | SNP | 0.35 |
| 851 | s6 | WT | 0.25 |
| 852 | s6 | SNP | 0.3 |
| 853 | s6 | WT | 0.25 |
| 854 | s6 | SNP | 0.3 |
| 855 | s6 | WT | 0.25 |
| 856 | s6 | SNP | 0.3 |
| 857 | s6 | WT | 0.25 |
| 858 | s6 | WT | 0.3 |
| 859 | s6 | SNP | 0.35 |
| 860 | s6 | WT | 0.25 |
| 861 | s6 | SNP | 0.3 |
| 862 | s6 | WT | 0.25 |
| 863 | s6 | SNP | 0.3 |
| 864 | s6 | SNP | 0.35 |
| 865 | s6 | WT | 0.3 |
| 866 | s6 | WT | 0.25 |
| 867 | s6 | SNP | 0.3 |
| 868 | s6 | SNP | 0.3 |
| 869 | s6 | WT | 0.25 |
| 870 | s6 | SNP | 0.3 |
| 871 | s6 | WT | 0.3 |
| 872 | s6 | SNP | 0.3 |
| 873 | s6 | WT | 0.25 |
| 874 | s6 | SNP | 0.3 |
| 875 | s6 | WT | 0.25 |
| 876 | s6 | WT | 0.25 |
| 877 | s6 | SNP | 0.3 |
| 878 | s6 | WT | 0.3 |
| 879 | s6 | SNP | 0.35 |
| 880 | s6 | WT | 0.3 |
| 881 | s6 | SNP | 0.35 |
| 882 | s6 | SNP | 0.3 |
| 883 | s6 | WT | 0.25 |
| 884 | s6 | WT | 0.25 |
| 885 | s6 | SNP | 0.3 |
| 886 | s6 | WT | 0.25 |
| 887 | s6 | SNP | 0.3 |
| 888 | s6 | SNP | 0.35 |
| 889 | s6 | WT | 0.3 |
| 890 | s6 | WT | 0.25 |
| 891 | s6 | SNP | 0.3 |
| 892 | s6 | SNP | 0.35 |
| 893 | s6 | WT | 0.3 |
| 894 | s6 | SNP | 0.35 |
| 895 | s6 | SNP | 0.3 |
| 896 | s6 | WT | 0.25 |
| 897 | s6 | SNP | 0.3 |
| 898 | s6 | WT | 0.25 |
| 899 | s6 | WT | 0.2 |
| 900 | s6 | SNP | 0.25 |
| 901 | s6 | SNP | 0.3 |
| 902 | s6 | WT | 0.25 |
| 903 | s6 | SNP | 0.3 |
| 904 | s6 | SNP | 0.35 |
| 905 | s6 | WT | 0.3 |
| 906 | s6 | WT | 0.25 |
| 907 | s6 | SNP | 0.3 |
| 908 | s6 | WT | 0.25 |
| 909 | s6 | WT | 0.25 |
| 910 | s6 | SNP | 0.3 |
| 911 | s6 | SNP | 0.3 |
| 912 | s6 | WT | 0.25 |
| 913 | s6 | SNP | 0.3 |
| 914 | s6 | WT | 0.25 |
| 915 | s6 | WT | 0.25 |
| 916 | s6 | SNP | 0.3 |
| 917 | s6 | WT | 0.25 |
| 918 | s6 | SNP | 0.3 |
| 919 | s7 | SNP | 0.5 |
| 920 | s7 | WT | 0.45 |
| 921 | s7 | SNP | 0.55 |
| 922 | s7 | WT | 0.5 |
| 923 | s7 | WT | 0.5 |
| 924 | s7 | SNP | 0.55 |
| 925 | s7 | SNP | 0.5 |
| 926 | s7 | WT | 0.45 |
| 927 | s7 | SNP | 0.55 |
| 928 | s7 | WT | 0.5 |
| 929 | s7 | WT | 0.55 |
| 930 | s7 | SNP | 0.6 |
| 931 | s7 | SNP | 0.55 |
| 932 | s7 | WT | 0.5 |
| 933 | s7 | SNP | 0.45 |
| 934 | s7 | WT | 0.4 |
| 935 | s7 | WT | 0.5 |
| 936 | s7 | SNP | 0.55 |
| 937 | s7 | SNP | 0.6 |
| 938 | s7 | WT | 0.55 |
| 939 | s7 | WT | 0.45 |
| 940 | s7 | SNP | 0.5 |
| 941 | s7 | WT | 0.55 |
| 942 | s7 | SNP | 0.6 |
| 943 | s7 | SNP | 0.55 |
| 944 | s7 | WT | 0.5 |
| 945 | s7 | SNP | 0.6 |
| 946 | s7 | SNP | 0.6 |
| 947 | s7 | WT | 0.55 |
| 948 | s7 | SNP | 0.6 |
| 949 | s7 | SNP | 0.5 |
| 950 | s7 | WT | 0.45 |
| 951 | s7 | WT | 0.55 |
| 952 | s7 | SNP | 0.5 |
| 953 | s7 | WT | 0.45 |
| 954 | s7 | SNP | 0.6 |
| 955 | s7 | WT | 0.55 |
| 956 | s7 | WT | 0.5 |
| 957 | s7 | SNP | 0.55 |
| 958 | s7 | WT | 0.5 |
| 959 | s7 | SNP | 0.55 |
| 960 | s7 | WT | 0.55 |
| 961 | s7 | SNP | 0.6 |
| 962 | s7 | SNP | 0.55 |
| 963 | s7 | WT | 0.5 |
| 964 | s7 | WT | 0.45 |
| 965 | s7 | SNP | 0.65 |
| 966 | s7 | SNP | 0.5 |
| 967 | s7 | SNP | 0.5 |
| 968 | s7 | WT | 0.45 |
| 969 | s7 | WT | 0.6 |
| 970 | s7 | WT | 0.55 |
| 971 | s7 | SNP | 0.6 |
| 972 | s7 | WT | 0.55 |
| 973 | s7 | SNP | 0.6 |
| 974 | s7 | WT | 0.45 |
| 975 | s7 | SNP | 0.5 |
| 976 | s7 | WT | 0.6 |
| 977 | s7 | SNP | 0.65 |
| 978 | s7 | WT | 0.45 |
| 979 | s7 | SNP | 0.5 |
| 980 | s7 | WT | 0.5 |
| 981 | s7 | SNP | 0.55 |
| 982 | s7 | SNP | 0.5 |
| 983 | s7 | WT | 0.45 |
| 984 | s7 | WT | 0.55 |
| 985 | s7 | SNP | 0.65 |
| 986 | s7 | WT | 0.6 |
| 987 | s7 | WT | 0.45 |
| 988 | s7 | SNP | 0.5 |
| 989 | s7 | WT | 0.6 |
| 990 | s7 | SNP | 0.65 |
| 991 | s7 | SNP | 0.6 |
| 992 | s7 | WT | 0.55 |
| 993 | s13 | WT | 0.45 |
| 994 | s13 | SNP | 0.5 |
| 995 | s13 | WT | 0.55 |
| 996 | s13 | SNP | 0.55 |
| 997 | s13 | WT | 0.5 |
| 998 | s13 | SNP | 0.6 |
| 999 | s13 | SNP | 0.55 |
| 1000 | s13 | WT | 0.5 |
| 1001 | s13 | WT | 0.55 |
| 1002 | s13 | SNP | 0.6 |
| 1003 | s13 | SNP | 0.55 |
| 1004 | s13 | WT | 0.5 |
| 1005 | s13 | SNP | 0.6 |
| 1006 | s13 | SNP | 0.6 |
| 1007 | s13 | WT | 0.55 |
| 1008 | s13 | WT | 0.55 |
| 1009 | s13 | SNP | 0.6 |
| 1010 | s13 | WT | 0.55 |
| 1011 | s13 | SNP | 0.6 |
| 1012 | s13 | SNP | 0.6 |
| 1013 | s13 | WT | 0.55 |
| 1014 | s13 | WT | 0.55 |
| 1015 | s13 | WT | 0.55 |
| 1016 | s13 | SNP | 0.6 |
| 1017 | s13 | WT | 0.55 |
| 1018 | s13 | SNP | 0.6 |
| 1019 | s13 | WT | 0.55 |
| 1020 | s13 | SNP | 0.6 |
| 1021 | s13 | WT | 0.55 |
| 1022 | s13 | SNP | 0.6 |
| 1023 | s13 | WT | 0.5 |
| 1024 | s13 | SNP | 0.55 |
| 1025 | s13 | WT | 0.55 |
| 1026 | s13 | SNP | 0.6 |
| 1027 | s13 | SNP | 0.55 |
| 1028 | s13 | WT | 0.5 |
| 1029 | s13 | SNP | 0.6 |
| 1030 | s13 | SNP | 0.6 |
| 1031 | s13 | SNP | 0.6 |
| 1032 | s13 | WT | 0.55 |
| 1033 | s13 | WT | 0.5 |
| 1034 | s13 | SNP | 0.55 |
| 1035 | s13 | WT | 0.55 |
| 1036 | s13 | SNP | 0.6 |
| 1037 | s13 | WT | 0.55 |
| 1038 | s13 | SNP | 0.55 |
| 1039 | s13 | WT | 0.5 |
| 1040 | s13 | WT | 0.55 |
| 1041 | s13 | SNP | 0.6 |
| 1042 | s13 | SNP | 0.55 |
| 1043 | s13 | WT | 0.5 |
| 1044 | s13 | WT | 0.55 |
| 1045 | s13 | WT | 0.55 |
| 1046 | s13 | SNP | 0.6 |
| 1047 | s13 | WT | 0.5 |
| 1048 | s13 | SNP | 0.55 |
| 1049 | s13 | WT | 0.5 |
| 1050 | s13 | SNP | 0.55 |
| 1051 | s13 | SNP | 0.55 |
| 1052 | s13 | WT | 0.5 |
| 1053 | s14 | SNP | 0.5 |
| 1054 | s14 | WT | 0.55 |
| 1055 | s14 | SNP | 0.5 |
| 1056 | s14 | SNP | 0.55 |
| 1057 | s14 | WT | 0.6 |
| 1058 | s14 | WT | 0.55 |
| 1059 | s14 | SNP | 0.45 |
| 1060 | s14 | SNP | 0.5 |
| 1061 | s14 | SNP | 0.55 |
| 1062 | s14 | WT | 0.6 |
| 1063 | s14 | WT | 0.55 |
| 1064 | s14 | SNP | 0.55 |
| 1065 | s14 | WT | 0.6 |
| 1066 | s14 | SNP | 0.55 |
| 1067 | s14 | WT | 0.6 |
| 1068 | s14 | WT | 0.6 |
| 1069 | s14 | SNP | 0.55 |
| 1070 | s14 | SNP | 0.55 |
| 1071 | s14 | WT | 0.6 |
| 1072 | s14 | WT | 0.65 |
| 1073 | s14 | SNP | 0.6 |
| 1074 | s14 | WT | 0.55 |
| 1075 | s14 | WT | 0.65 |
| 1076 | s14 | SNP | 0.6 |
| 1077 | s14 | SNP | 0.55 |
| 1078 | s14 | WT | 0.6 |
| 1079 | s14 | WT | 0.6 |
| 1080 | s14 | SNP | 0.55 |
| 1081 | s14 | SNP | 0.5 |
| 1082 | s14 | SNP | 0.55 |
| 1083 | s14 | WT | 0.6 |
| 1084 | s14 | WT | 0.5 |
| 1085 | s14 | SNP | 0.6 |
| 1086 | s14 | WT | 0.65 |
| 1087 | s14 | WT | 0.65 |
| 1088 | s14 | SNP | 0.6 |
| 1089 | s14 | SNP | 0.6 |
| 1090 | s14 | WT | 0.65 |
| 1091 | s14 | WT | 0.55 |
| 1092 | s14 | SNP | 0.6 |
| 1093 | s14 | WT | 0.65 |
| 1094 | s14 | WT | 0.6 |
| 1095 | s14 | SNP | 0.55 |
| 1096 | s14 | WT | 0.65 |
| 1097 | s14 | SNP | 0.6 |
| 1098 | s14 | SNP | 0.55 |
| 1099 | s14 | WT | 0.6 |
| 1100 | s14 | WT | 0.6 |
| 1101 | s14 | SNP | 0.55 |
| 1102 | s14 | SNP | 0.5 |
| 1103 | s14 | WT | 0.6 |
| 1104 | s14 | SNP | 0.55 |
| 1105 | s14 | WT | 0.6 |
| 1106 | s14 | SNP | 0.55 |
| 1107 | s14 | WT | 0.55 |
| 1108 | s14 | SNP | 0.5 |
| 1109 | s14 | WT | 0.6 |
| 1110 | s14 | SNP | 0.55 |
| 1111 | s14 | WT | 0.55 |
| 1112 | s14 | SNP | 0.5 |
| 1113 | s14 | WT | 0.55 |
| 1114 | s14 | SNP | 0.5 |
| 1115 | s15 | SNP | 0.25 |
| 1116 | s15 | SNP | 0.25 |
| 1117 | s15 | WT | 0.3 |
| 1118 | s15 | SNP | 0.3 |
| 1119 | s15 | SNP | 0.2 |
| 1120 | s15 | WT | 0.25 |
| 1121 | s15 | SNP | 0.25 |
| 1122 | s15 | WT | 0.3 |
| 1123 | s15 | WT | 0.3 |
| 1124 | s15 | SNP | 0.25 |
| 1125 | s15 | WT | 0.3 |
| 1126 | s15 | SNP | 0.2 |
| 1127 | s15 | WT | 0.25 |
| 1128 | s15 | SNP | 0.25 |
| 1129 | s15 | WT | 0.3 |
| 1130 | s15 | WT | 0.3 |
| 1131 | s15 | SNP | 0.25 |
| 1132 | s15 | SNP | 0.25 |
| 1133 | s15 | WT | 0.3 |
| 1134 | s15 | SNP | 0.25 |
| 1135 | s15 | WT | 0.3 |
| 1136 | s15 | WT | 0.3 |
| 1137 | s15 | SNP | 0.25 |
| 1138 | s15 | WT | 0.3 |
| 1139 | s15 | WT | 0.3 |
| 1140 | s15 | SNP | 0.25 |
| 1141 | s15 | SNP | 0.3 |
| 1142 | s15 | WT | 0.35 |
| 1143 | s15 | WT | 0.35 |
| 1144 | s15 | WT | 0.35 |
| 1145 | s15 | WT | 0.35 |
| 1146 | s15 | SNP | 0.3 |
| 1147 | s15 | SNP | 0.3 |
| 1148 | s15 | WT | 0.3 |
| 1149 | s15 | SNP | 0.25 |
| 1150 | s15 | SNP | 0.2 |
| 1151 | s15 | SNP | 0.15 |
| 1152 | s15 | SNP | 0.25 |
| 1153 | s15 | WT | 0.3 |
| 1154 | s15 | WT | 0.25 |
| 1155 | s15 | SNP | 0.25 |
| 1156 | s15 | WT | 0.3 |
| 1157 | s15 | WT | 0.3 |
| 1158 | s15 | SNP | 0.25 |
| 1159 | s15 | WT | 0.3 |
| 1160 | s15 | SNP | 0.25 |
| 1161 | s15 | SNP | 0.3 |
| 1162 | s15 | WT | 0.35 |
| 1163 | s15 | WT | 0.35 |
| 1164 | s15 | SNP | 0.3 |
| 1165 | s15 | SNP | 0.2 |
| 1166 | s15 | WT | 0.25 |
| 1167 | s15 | SNP | 0.25 |
| 1168 | s15 | WT | 0.3 |
| 1169 | s15 | SNP | 0.25 |
| 1170 | s15 | WT | 0.25 |
| 1171 | s15 | SNP | 0.2 |
| 1172 | s15 | WT | 0.3 |
| 1173 | s15 | SNP | 0.25 |
| 1174 | s15 | SNP | 0.25 |
| 1175 | s15 | WT | 0.3 |
| 1176 | s15 | WT | 0.3 |
| 1177 | s15 | SNP | 0.25 |
| 1178 | s15 | WT | 0.25 |
| 1179 | s15 | SNP | 0.2 |
| 1180 | s15 | WT | 0.25 |
| 1181 | s15 | SNP | 0.2 |
| 1182 | s15 | WT | 0.3 |
| 1183 | s15 | SNP | 0.25 |
| 1184 | s15 | WT | 0.2 |
| 1185 | s15 | SNP | 0.15 |
| 1186 | s16 | WT | 0.45 |
| 1187 | s16 | SNP | 0.4 |
| 1188 | s16 | WT | 0.45 |
| 1189 | s16 | SNP | 0.4 |
| 1190 | s16 | SNP | 0.4 |
| 1191 | s16 | SNP | 0.4 |
| 1192 | s16 | WI | 0.45 |
| 1193 | s16 | WT | 0.35 |
| 1194 | s16 | WT | 0.4 |
| 1195 | s16 | WT | 0.45 |
| 1196 | s16 | SNP | 0.4 |
| 1197 | s16 | SNP | 0.35 |
| 1198 | s16 | WT | 0.5 |
| 1199 | s16 | SNP | 0.45 |
| 1200 | s16 | WT | 0.45 |
| 1201 | s16 | SNP | 0.4 |
| 1202 | s16 | WT | 0.55 |
| 1203 | s16 | SNP | 0.5 |
| 1204 | s16 | WT | 0.45 |
| 1205 | s16 | SNP | 0.4 |
| 1206 | s16 | WT | 0.45 |
| 1207 | s16 | SNP | 0.4 |
| 1208 | s16 | SNP | 0.4 |
| 1209 | s16 | WT | 0.45 |
| 1210 | s16 | WT | 0.45 |
| 1211 | s16 | SNP | 0.5 |
| 1212 | s16 | WT | 0.55 |
| 1213 | s16 | SNP | 0.4 |
| 1214 | s16 | WT | 0.45 |
| 1215 | s16 | SNP | 0.45 |
| 1216 | s16 | WT | 0.5 |
| 1217 | s16 | SNP | 0.4 |
| 1218 | s16 | WT | 0.45 |
| 1219 | s16 | SNP | 0.4 |
| 1220 | s16 | WT | 0.45 |
| 1221 | s16 | WT | 0.45 |
| 1222 | s16 | SNP | 0.4 |
| 1723 | s16 | SNP | 0.35 |
| 1224 | s16 | SNP | 0.3 |
| 1225 | s16 | SNP | 0.35 |
| 1226 | s16 | SNP | 0.35 |
| 1227 | s16 | WT | 0.4 |
| 1228 | s16 | WT | 0.4 |
| 1229 | s16 | WT | 0.45 |
| 1230 | s16 | SNP | 0.4 |
| 1231 | s16 | WT | 0.45 |
| 1232 | s16 | SNP | 0.4 |
| 1233 | s16 | WT | 0.4 |
| 1234 | s16 | SNP | 0.35 |
| 1235 | s16 | WT | 0.4 |
| 1236 | s16 | SNP | 0.45 |
| 1237 | s16 | WT | 0.5 |
| 1238 | s16 | WT | 0.45 |
| 1239 | s16 | SNP | 0.4 |
| 1240 | s16 | WT | 0.5 |
| 1241 | s16 | SNP | 0.45 |
| 1242 | s16 | WT | 0.4 |
| 1243 | s16 | SNP | 0.35 |
| 1244 | s16 | SNP | 0.45 |
| 1245 | s16 | WT | 0.5 |
| 1246 | s16 | SNP | 0.45 |
| 1247 | s16 | WT | 0.5 |
| 1248 | s16 | SNP | 0.4 |
| 1249 | s16 | WT | 0.45 |
| 1250 | s17 | WT | 0.5 |
| 1251 | s17 | SNP | 0.45 |
| 1252 | s17 | WT | 0.5 |
| 1253 | s17 | SNP | 0.45 |
| 1254 | s17 | WT | 0.4 |
| 1255 | s17 | SNP | 0.35 |
| 1256 | s17 | WT | 0.5 |
| 1257 | s17 | SNP | 0.45 |
| 1258 | s17 | SNP | 0.3 |
| 1259 | s17 | WT | 0.35 |
| 1260 | s17 | WT | 0.45 |
| 1261 | s17 | SNP | 0.4 |
| 1262 | s17 | WT | 0.5 |
| 1263 | s17 | SNP | 0.45 |
| 1264 | s17 | SNP | 0.45 |
| 1265 | s17 | WT | 0.5 |
| 1266 | s17 | WT | 0.3 |
| 1267 | s17 | WT | 0.5 |
| 1268 | s17 | SNP | 0.45 |
| 1269 | s17 | SNP | 0.45 |
| 1270 | s17 | WT | 0.5 |
| 1271 | s17 | SNP | 0.45 |
| 1272 | s17 | WT | 0.5 |
| 1273 | s17 | WT | 0.35 |
| 1274 | s17 | SNP | 0.3 |
| 1275 | s17 | SNP | 0.25 |
| 1276 | s17 | SNP | 0.3 |
| 1277 | s17 | WT | 0.35 |
| 1278 | s17 | WT | 0.4 |
| 1279 | s17 | SNP | 0.35 |
| 1280 | s17 | WT | 0.3 |
| 1281 | s17 | SNP | 0.35 |
| 1282 | s17 | SNP | 0.25 |
| 1283 | s17 | WT | 0.45 |
| 1284 | s17 | SNP | 0.4 |
| 1285 | s17 | SNP | 0.4 |
| 1286 | s17 | WT | 0.45 |
| 1287 | s17 | WT | 0.35 |
| 1288 | s17 | WT | 0.4 |
| 1289 | s17 | SNP | 0.45 |
| 1290 | s17 | WT | 0.5 |
| 1291 | s17 | SNP | 0.25 |
| 1292 | s17 | WT | 0.3 |
| 1293 | s17 | WT | 0.5 |
| 1294 | s17 | SNP | 0.45 |
| 1295 | s17 | WT | 0.35 |
| 1296 | s17 | SNP | 0.3 |
| 1297 | s17 | WT | 0.5 |
| 1298 | s17 | SNP | 0.45 |
| 1299 | s17 | SNP | 0.45 |
| 1300 | s17 | WT | 0.5 |
| 1301 | s17 | SNP | 0.3 |
| 1302 | s17 | WT | 0.35 |
| 1303 | s17 | SNP | 0.3 |
| 1304 | s17 | WT | 0.35 |
| 1305 | s17 | SNP | 0.45 |
| 1306 | s17 | WT | 0.5 |
| 1307 | s17 | SNP | 0.4 |
| 1308 | s17 | WT | 0.45 |
| 1309 | s17 | SNP | 0.45 |
| 1310 | s17 | WT | 0.5 |
| 1311 | s17 | WT | 0.35 |
| 1312 | s17 | SNP | 0.3 |
| 1313 | s17 | SNP | 0.45 |
| 1314 | s17 | WT | 0.5 |
| 1315 | s17 | SNP | 0.3 |
| 1316 | s17 | SNP | 0.25 |
| 1317 | s17 | WT | 0.3 |
| 1318 | s17 | SNP | 0.35 |
| 1319 | s17 | WT | 0.4 |
| 1320 | s18 | WT | 0.35 |
| 1321 | s18 | SNP | 0.45 |
| 1322 | s18 | WT | 0.4 |
| 1323 | s18 | SNP | 0.4 |
| 1324 | s18 | WT | 0.35 |
| 1325 | s18 | SNP | 0.4 |
| 1326 | s18 | WT | 0.35 |
| 1327 | s18 | WT | 0.35 |
| 1328 | s18 | SNP | 0.4 |
| 1329 | s18 | SNP | 0.4 |
| 1330 | s18 | WT | 0.45 |
| 1331 | s18 | SNP | 0.5 |
| 1332 | s18 | WT | 0.45 |
| 1333 | s18 | SNP | 0.5 |
| 1334 | s18 | WT | 0.35 |
| 1335 | s18 | SNP | 0.4 |
| 1336 | s18 | SNP | 0.5 |
| 1337 | s18 | WT | 0.45 |
| 1338 | s18 | SNP | 0.45 |
| 1339 | s18 | WT | 0.4 |
| 1340 | s18 | WT | 0.35 |
| 1341 | s18 | SNP | 0.4 |
| 1342 | s18 | WT | 0.4 |
| 1343 | s18 | SNP | 0.45 |
| 1344 | s18 | WT | 0.4 |
| 1345 | s18 | SNP | 0.45 |
| 1346 | s18 | WT | 0.45 |
| 1347 | s18 | SNP | 0.5 |
| 1348 | s18 | SNP | 0.45 |
| 1349 | s18 | WT | 0.4 |
| 1350 | s18 | SNP | 0.55 |
| 1351 | s18 | WT | 0.5 |
| 1352 | s18 | SNP | 0.4 |
| 1353 | s18 | WT | 0.35 |
| 1354 | s18 | SNP | 0.55 |
| 1355 | s18 | SNP | 0.5 |
| 1356 | s18 | WT | 0.45 |
| 1357 | s18 | WT | 0.4 |
| 1358 | s18 | SNP | 0.45 |
| 1359 | s18 | WT | 0.5 |
| 1360 | s18 | SNP | 0.55 |
| 1361 | s18 | WT | 0.5 |
| 1362 | s18 | SNP | 0.55 |
| 1363 | s18 | WT | 0.45 |
| 1364 | s18 | SNP | 0.5 |
| 1365 | s18 | SNP | 0.4 |
| 1366 | s18 | WT | 0.35 |
| 1367 | s18 | WT | 0.35 |
| 1368 | s18 | SNP | 0.4 |
| 1369 | s18 | SNP | 0.5 |
| 1370 | s18 | WT | 0.45 |
| 1371 | s18 | SNP | 0.5 |
| 1372 | s18 | WT | 0.5 |
| 1373 | s18 | SNP | 0.45 |
| 1374 | s18 | WT | 0.4 |
| 1375 | s18 | WT | 0.45 |
| 1376 | s18 | SNP | 0.4 |
| 1377 | s18 | WT | 0.35 |
| 1378 | s20 | SNP | 0.4 |
| 1379 | s20 | WT | 0.45 |
| 1380 | s20 | SNP | 0.45 |
| 1381 | s20 | WT | 0.5 |
| 1382 | s20 | WT | 0.45 |
| 1383 | s20 | SNP | 0.4 |
| 1384 | s20 | WT | 0.45 |
| 1385 | s20 | SNP | 0.4 |
| 1386 | s20 | WT | 0.5 |
| 1387 | s20 | SNP | 0.45 |
| 1388 | s20 | SNP | 0.45 |
| 1389 | s20 | WT | 0.5 |
| 1390 | s20 | SNP | 0.4 |
| 1391 | s20 | WT | 0.45 |
| 1392 | s20 | WT | 0.5 |
| 1393 | s20 | SNP | 0.45 |
| 1394 | s20 | SNP | 0.4 |
| 1395 | s20 | WT | 0.45 |
| 1396 | s20 | SNP | 0.35 |
| 1397 | s20 | WT | 0.4 |
| 1398 | s20 | SNP | 0.4 |
| 1399 | s20 | WT | 0.45 |
| 1400 | s20 | WT | 0.45 |
| 1401 | s20 | SNP | 0.4 |
| 1402 | s20 | SNP | 0.35 |
| 1403 | s20 | WT | 0.4 |
| 1404 | s20 | WT | 0.4 |
| 1405 | s20 | SNP | 0.35 |
| 1406 | s20 | WT | 0.45 |
| 1407 | s20 | SNP | 0.4 |
| 1408 | s20 | SNP | 0.4 |
| 1409 | s20 | WT | 0.45 |
| 1410 | s20 | WT | 0.45 |
| 1411 | s20 | SNP | 0.4 |
| 1412 | s20 | SNP | 0.4 |
| 1413 | s20 | WT | 0.45 |
| 1414 | s20 | SNP | 0.35 |
| 1415 | s20 | WT | 0.4 |
| 1416 | s20 | SNP | 0.4 |
| 1417 | s20 | WT | 0.45 |
| 1418 | s20 | WT | 0.45 |
| 1419 | s20 | WT | 0.4 |
| 1420 | s20 | SNP | 0.35 |
| 1421 | s20 | SNP | 0.4 |
| 1422 | s20 | SNP | 0.35 |
| 1423 | s1 | SNP | 0.4 |
| 1424 | s1 | WT | 0.45 |
| 1425 | s1 | WT | 0.45 |
| 1426 | s1 | SNP | 0.4 |
| 1427 | s1 | SNP | 0.45 |
| 1428 | s1 | WT | 0.5 |
| 1429 | s1 | SNP | 0.35 |
| 1430 | s1 | WT | 0.4 |
| 1431 | s1 | SNP | 0.4 |
| 1432 | s1 | SNP | 0.45 |
| 1433 | s1 | WT | 0.45 |
| 1434 | s1 | SNP | 0.4 |
| 1435 | s1 | WT | 0.5 |
| 1436 | s1 | WT | 0.5 |
| 1437 | s1 | SNP | 0.45 |
| 1438 | s1 | SNP | 0.45 |
| 1439 | s1 | WT | 0.5 |
| 1440 | s1 | WT | 0.5 |
| 1441 | s1 | SNP | 0.45 |
| 1442 | s1 | WT | 0.45 |
| 1443 | s1 | SNP | 0.4 |
| 1444 | s1 | SNP | 0.4 |
| 1445 | s1 | WT | 0.45 |
| 1446 | s1 | SNP | 0.45 |
| 1447 | s1 | WT | 0.5 |
| 1448 | s1 | WT | 0.5 |
| 1449 | s1 | SNP | 0.45 |
| 1450 | s1 | SNP | 0.45 |
| 1451 | s1 | WT | 0.5 |
| 1452 | s1 | WT | 0.5 |
| 1453 | s1 | SNP | 0.45 |
| 1454 | s1 | SNP | 0.4 |
| 1455 | s1 | WT | 0.45 |
| 1456 | s1 | WT | 0.45 |
| 1457 | s1 | SNP | 0.4 |
| 1458 | s1 | WT | 0.45 |
| 1459 | s1 | WT | 0.45 |
| 1460 | s1 | SNP | 0.4 |
| 1461 | s1 | SNP | 0.35 |
| 1462 | s1 | WT | 0.4 |
| 1463 | s1 | WT | 0.45 |
| 1464 | s1 | SNP | 0.4 |
| 1465 | s1 | WT | 0.5 |
| 1466 | s1 | SNP | 0.45 |
| 1467 | s1 | SNP | 0.45 |
| 1468 | s1 | WT | 0.5 |
| 1469 | s1 | WT | 0.5 |
| 1470 | s1 | SNP | 0.45 |
| 1471 | s1 | WT | 0.5 |
| 1472 | s1 | SNP | 0.45 |
| 1473 | s1 | SNP | 0.35 |
| 1474 | s1 | WT | 0.4 |
| 1475 | s1 | WT | 0.4 |
| 1476 | s1 | SNP | 0.35 |
| 1477 | s1 | WT | 0.45 |
| 1478 | s1 | SNP | 0.4 |
| 1479 | s1 | WT | 0.4 |
| 1480 | s1 | SNP | 0.35 |
| 1481 | s1 | WT | 0.4 |
| 1482 | s1 | SNP | 0.35 |
| 1483 | s1 | WT | 0.4 |
| 1484 | s1 | SNP | 0.35 |
| 1485 | s2 | WT | 0.45 |
| 1486 | s2 | SNP | 0.4 |
| 1487 | s2 | WT | 0.5 |
| 1488 | s2 | SNP | 0.45 |
| 1489 | s2 | SNP | 0.4 |
| 1490 | s2 | WT | 0.45 |
| 1491 | s2 | WT | 0.55 |
| 1492 | s2 | SNP | 0.5 |
| 1493 | s2 | SNP | 0.5 |
| 1494 | s2 | WT | 0.55 |
| 1495 | s2 | WT | 0.55 |
| 1496 | s2 | SNP | 0.4 |
| 1497 | s2 | SNP | 0.5 |
| 1498 | s2 | WT | 0.4 |
| 1499 | s2 | SNP | 0.35 |
| 1500 | s2 | WT | 0.55 |
| 1501 | s2 | SNP | 0.5 |
| 1502 | s2 | SNP | 0.5 |
| 1503 | s2 | WT | 0.55 |
| 1504 | s2 | SNP | 0.5 |
| 1505 | s2 | WT | 0.55 |
| 1506 | s2 | WT | 0.55 |
| 1507 | s2 | SNP | 0.55 |
| 1508 | s2 | WT | 0.6 |
| 1509 | s2 | WT | 0.55 |
| 1510 | s2 | SNP | 0.55 |
| 1511 | s2 | WT | 0.6 |
| 1512 | s2 | SNP | 0.5 |
| 1513 | s2 | SNP | 0.45 |
| 1514 | s2 | WT | 0.45 |
| 1515 | s2 | SNP | 0.4 |
| 1516 | s2 | WT | 0.6 |
| 1517 | s2 | SNP | 0.55 |
| 1518 | s2 | WT | 0.6 |
| 1519 | s2 | SNP | 0.55 |
| 1520 | s2 | WT | 0.6 |
| 1521 | s2 | SNP | 0.55 |
| 1522 | s2 | WT | 0.45 |
| 1523 | s2 | WT | 0.5 |
| 1524 | s2 | SNP | 0.5 |
| 1525 | s2 | WT | 0.55 |
| 1526 | s2 | SNP | 0.45 |
| 1527 | s2 | WT | 0.5 |
| 1528 | s2 | SNP | 0.4 |
| 1529 | s2 | WT | 0.45 |
| 1530 | s2 | SNP | 0.5 |
| 1531 | s2 | WT | 0.55 |
| 1532 | s2 | SNP | 0.4 |
| 1533 | s2 | WT | 0.45 |
| 1534 | s2 | WT | 0.5 |
| 1535 | s2 | SNP | 0.45 |
| 1536 | s2 | SNP | 0.5 |
| 1537 | s2 | WT | 0.45 |
| 1538 | s2 | SNP | 0.4 |
| 1539 | s2 | SNP | 0.5 |
| 1540 | s2 | WT | 0.55 |
| 1541 | s2 | WT | 0.55 |
| 1542 | s2 | SNP | 0.5 |
| 1543 | s2 | WT | 0.45 |
| 1544 | s2 | SNP | 0.4 |
| 1545 | s2 | SNP | 0.5 |
| 1546 | s2 | WT | 0.55 |
| 1547 | s9 | SNP | 0.4 |
| 1548 | s9 | WT | 0.45 |
| 1549 | s9 | SNP | 0.4 |
| 1550 | s9 | WT | 0.5 |
| 1551 | s9 | SNP | 0.45 |
| 1552 | s9 | WT | 0.5 |
| 1553 | s9 | SNP | 0.45 |
| 1554 | s9 | SNP | 0.45 |
| 1555 | s9 | WT | 0.5 |
| 1556 | s9 | WT | 0.5 |
| 1557 | s9 | SNP | 0.45 |
| 1558 | s9 | WT | 0.55 |
| 1559 | s9 | SNP | 0.5 |
| 1560 | s9 | WT | 0.45 |
| 1561 | s9 | SNP | 0.4 |
| 1562 | s9 | SNP | 0.4 |
| 1563 | s9 | WT | 0.45 |
| 1564 | s9 | SNP | 0.4 |
| 1565 | s9 | WT | 0.45 |
| 1566 | s9 | SNP | 0.45 |
| 1567 | s9 | SNP | 0.5 |
| 1568 | s9 | WT | 0.55 |
| 1569 | s9 | SNP | 0.45 |
| 1570 | s9 | WT | 0.5 |
| 1571 | s9 | SNP | 0.5 |
| 1572 | s9 | WT | 0.55 |
| 1573 | s9 | WT | 0.5 |
| 1574 | s9 | WT | 0.5 |
| 1575 | s9 | SNP | 0.45 |
| 1576 | s9 | SNP | 0.45 |
| 1577 | s9 | WT | 0.5 |
| 1578 | s9 | SNP | 0.5 |
| 1579 | s9 | WT | 0.55 |
| 1580 | s9 | WT | 0.45 |
| 1581 | s9 | WT | 0.5 |
| 1582 | s9 | SNP | 0.45 |
| 1583 | s9 | WT | 0.55 |
| 1584 | s9 | SNP | 0.5 |
| 1585 | s9 | SNP | 0.5 |
| 1586 | s9 | WT | 0.55 |
| 1587 | s9 | WT | 0.55 |
| 1588 | s9 | SNP | 0.5 |
| 1589 | s9 | WT | 0.5 |
| 1590 | s9 | SNP | 0.45 |
| 1591 | s9 | SNP | 0.45 |
| 1592 | s9 | WT | 0.5 |
| 1593 | s9 | WT | 0.45 |
| 1594 | s9 | SNP | 0.4 |
| 1595 | s9 | SNP | 0.5 |
| 1596 | s9 | WT | 0.55 |
| 1597 | s9 | SNP | 0.45 |
| 1598 | s9 | WT | 0.5 |
| 1599 | s9 | SNP | 0.45 |
| 1600 | s9 | WT | 0.5 |
| 1601 | s9 | SNP | 0.45 |
| 1602 | s9 | WT | 0.5 |
| 1603 | s9 | WT | 0.45 |
| 1604 | s9 | SNP | 0.4 |
| 1605 | s9 | SNP | 0.45 |
| 1606 | s9 | WT | 0.5 |
| 1607 | s9 | SNP | 0.4 |
| 1608 | s9 | WT | 0.45 |
| 1609 | s9 | SNP | 0.4 |
| 1610 | s9 | WT | 0.45 |
| 1611 | s10 | SNP | 0.45 |
| 1612 | s10 | WT | 0.5 |
| 1613 | s10 | WT | 0.55 |
| 1614 | s10 | SNP | 0.5 |
| 1615 | s10 | SNP | 0.45 |
| 1616 | s10 | SNP | 0.5 |
| 1617 | s10 | WT | 0.55 |
| 1618 | s10 | WT | 0.55 |
| 1619 | s10 | SNP | 0.5 |
| 1620 | s10 | WT | 0.55 |
| 1621 | s10 | SNP | 0.5 |
| 1622 | s10 | SNP | 0.5 |
| 1623 | sl 0 | WT | 0.55 |
| 1624 | s10 | SNP | 0.5 |
| 1625 | s10 | WT | 0.55 |
| 1626 | s10 | SNP | 0.6 |
| 1627 | s10 | WT | 0.65 |
| 1628 | s10 | WT | 0.55 |
| 1629 | s10 | SNP | 0.5 |
| 1630 | s10 | WT | 0.6 |
| 1631 | s10 | SNP | 0.55 |
| 1632 | s10 | SNP | 0.45 |
| 1633 | s10 | WT | 0.5 |
| 1634 | s10 | SNP | 0.5 |
| 1635 | s10 | WT | 0.55 |
| 1636 | s10 | SNP | 0.5 |
| 1637 | s10 | SNP | 0.55 |
| 1638 | s10 | WT | 0.6 |
| 1639 | s10 | SNP | 0.5 |
| 1640 | s10 | WT | 0.55 |
| 1641 | s10 | WT | 0.55 |
| 1642 | s10 | SNP | 0.5 |
| 1643 | s10 | WT | 0.65 |
| 1644 | s10 | WT | 0.55 |
| 1645 | s10 | SNP | 0.5 |
| 1646 | s10 | WT | 0.55 |
| 1647 | s10 | WT | 0.6 |
| 1648 | s10 | SNP | 0.55 |
| 1649 | s10 | SNP | 0.6 |
| 1650 | s10 | WT | 0.65 |
| 1651 | s10 | WT | 0.6 |
| 1652 | s10 | SNP | 0.55 |
| 1653 | s10 | SNP | 0.45 |
| 1654 | s10 | WT | 0.5 |
| 1655 | s10 | SNP | 0.55 |
| 1656 | s10 | WT | 0.6 |
| 1657 | s10 | WT | 0.5 |
| 1658 | s10 | WT | 0.65 |
| 1659 | s10 | SNP | 0.5 |
| 1660 | s10 | WT | 0.55 |
| 1661 | s10 | SNP | 0.6 |
| 1662 | s10 | WT | 0.65 |
| 1663 | s10 | WT | 0.55 |
| 1664 | s10 | SNP | 0.5 |
| 1665 | s10 | WT | 0.5 |
| 1666 | s10 | SNP | 0.45 |
| 1667 | s10 | SNP | 0.6 |
| 1668 | s10 | WT | 0.55 |
| 1669 | s10 | SNP | 0.5 |
| 1670 | s10 | WT | 0.5 |
| 1671 | s10 | SNP | 0.45 |
| 1672 | s10 | WT | 0.5 |
| 1673 | s10 | SNP | 0.45 |
| 1674 | s10 | SNP | 0.5 |
| 1675 | s10 | WT | 0.55 |
| 1676 | s10 | SNP | 0.6 |
| 1677 | s10 | WT | 0.65 |
| 1678 | s10 | WT | 0.55 |
| 1679 | s10 | SNP | 0.5 |
| 1680 | s10 | SNP | 0.6 |
| 1681 | s10 | SNP | 0.5 |
| 1682 | s10 | WT | 0.5 |
| 1683 | s10 | SNP | 0.45 |
| 1684 | s10 | WT | 0.55 |
| 1685 | s11 | WT | 0.4 |
| 1686 | s11 | SNP | 0.35 |
| 1687 | s11 | SNP | 0.3 |
| 1688 | s11 | WT | 0.35 |
| 1689 | s11 | SNP | 0.3 |
| 1690 | s11 | WT | 0.45 |
| 1691 | s11 | SNP | 0.4 |
| 1692 | s11 | WT | 0.5 |
| 1693 | s11 | SNP | 0.4 |
| 1694 | s11 | WT | 0.45 |
| 1695 | s11 | SNP | 0.4 |
| 1696 | s11 | WT | 0.45 |
| 1697 | s11 | SNP | 0.45 |
| 1698 | s11 | WT | 0.5 |
| 1699 | s11 | SNP | 0.45 |
| 1700 | s11 | SNP | 0.45 |
| 1701 | s11 | WT | 0.5 |
| 1702 | s11 | WT | 0.35 |
| 1703 | s11 | SNP | 0.3 |
| 1704 | s11 | SNP | 0.35 |
| 1705 | s11 | WT | 0.4 |
| 1706 | s11 | SNP | 0.35 |
| 1707 | s11 | WT | 0.4 |
| 1708 | s11 | SNP | 0.35 |
| 1709 | s11 | WT | 0.4 |
| 1710 | s11 | SNP | 0.3 |
| 1711 | s11 | WT | 0.35 |
| 1712 | s11 | SNP | 0.3 |
| 1713 | s11 | WT | 0.45 |
| 1714 | s11 | SNP | 0.4 |
| 1715 | s11 | WT | 0.35 |
| 1716 | s11 | WT | 0.35 |
| 1717 | s11 | WT | 0.35 |
| 1718 | s11 | SNP | 0.3 |
| 1719 | s11 | WT | 0.35 |
| 1720 | s11 | SNP | 0.3 |
| 1721 | s11 | SNP | 0.4 |
| 1722 | s11 | WT | 0.45 |
| 1723 | s11 | SNP | 0.35 |
| 1724 | s11 | WT | 0.4 |
| 1725 | s11 | SNP | 0.45 |
| 1726 | s11 | WT | 0.5 |
| 1727 | s11 | SNP | 0.35 |
| 1728 | s11 | WT | 0.4 |
| 1729 | s11 | SNP | 0.3 |
| 1730 | s11 | WT | 0.35 |
| 1731 | s11 | WT | 0.35 |
| 1732 | s11 | SNP | 0.3 |
| 1733 | s11 | WT | 0.4 |
| 1734 | s11 | SNP | 0.35 |
| 1735 | s11 | WT | 0.4 |
| 1736 | s11 | SNP | 0.35 |
| 1737 | s11 | SNP | 0.3 |
| 1738 | s11 | WT | 0.35 |
| 1739 | s11 | SNP | 0.35 |
| 1740 | s11 | WT | 0.4 |
| 1741 | s11 | SNP | 0.3 |
| 1742 | s11 | WT | 0.35 |
| 1743 | s11 | SNP | 0.3 |
| 1744 | s11 | WT | 0.35 |
| 1745 | s12 | WT | 0.45 |
| 1746 | s12 | SNP | 0.45 |
| 1747 | s12 | WT | 0.4 |
| 1748 | s12 | WT | 0.4 |
| 1749 | s12 | SNP | 0.45 |
| 1750 | s12 | SNP | 0.5 |
| 1751 | s12 | WT | 0.5 |
| 1752 | s12 | SNP | 0.5 |
| 1753 | s12 | WT | 0.45 |
| 1754 | s12 | WT | 0.4 |
| 1755 | s12 | SNP | 0.45 |
| 1756 | s12 | SNP | 0.45 |
| 1757 | s12 | WT | 0.4 |
| 1758 | s12 | WT | 0.45 |
| 1759 | s12 | SNP | 0.5 |
| 1760 | s12 | SNP | 0.55 |
| 1761 | s12 | SNP | 0.55 |
| 1762 | s12 | WT | 0.5 |
| 1763 | s12 | WT | 0.4 |
| 1764 | s12 | SNP | 0.45 |
| 1765 | s12 | SNP | 0.5 |
| 1766 | s12 | WT | 0.45 |
| 1767 | s12 | SNP | 0.5 |
| 1768 | s12 | WT | 0.45 |
| 1769 | s12 | WT | 0.45 |
| 1770 | s12 | SNP | 0.5 |
| 1771 | s12 | WT | 0.45 |
| 1772 | s12 | SNP | 0.5 |
| 1773 | s12 | WT | 0.45 |
| 1774 | s12 | SNP | 0.5 |
| 1775 | s12 | WT | 0.45 |
| 1776 | s12 | SNP | 0.5 |
| 1777 | s12 | SNP | 0.55 |
| 1778 | s12 | WT | 0.5 |
| 1779 | s12 | SNP | 0.45 |
| 1780 | s12 | WT | 0.4 |
| 1781 | s12 | SNP | 0.55 |
| 1782 | s12 | SNP | 0.5 |
| 1783 | s12 | WT | 0.45 |
| 1784 | s12 | SNP | 0.5 |
| 1785 | s12 | WT | 0.45 |
| 1786 | s12 | SNP | 0.5 |
| 1787 | s12 | WT | 0.45 |
| 1788 | s12 | WT | 0.45 |
| 1789 | s12 | SNP | 0.5 |
| 1790 | s12 | WT | 0.45 |
| 1791 | s12 | SNP | 0.5 |
| 1792 | s12 | WT | 0.5 |
| 1793 | s12 | SNP | 0.55 |
| 1794 | s12 | SNP | 0.5 |
| 1795 | s12 | WT | 0.45 |
| 1796 | s12 | SNP | 0.55 |
| 1797 | s12 | WT | 0.5 |
| 1798 | s12 | SNP | 0.5 |
| 1799 | s12 | WT | 0.45 |
| 1800 | s12 | SNP | 0.5 |
| 1801 | s12 | WT | 0.45 |
| 1802 | s12 | SNP | 0.55 |
| 1803 | s12 | WT | 0.5 |
| 1804 | s12 | WT | 0.45 |
| 1805 | s12 | SNP | 0.45 |
| 1806 | s12 | WT | 0.4 |
| 1807 | s12 | SNP | 0.5 |
| 1808 | s12 | WT | 0.45 |
| 1809 | s12 | SNP | 0.5 |
| 1810 | s12 | WT | 0.45 |
| 1811 | s12 | SNP | 0.5 |
| 1812 | s12 | SNP | 0.5 |
| 1813 | s12 | WT | 0.45 |
| 1814 | s12 | WT | 0.5 |
| 1815 | s21 | WT | 0.55 |
| 1816 | s21 | SNP | 0.5 |
| 1817 | s21 | SNP | 0.5 |
| 1818 | s21 | SNP | 0.6 |
| 1819 | s21 | WT | 0.65 |
| 1820 | s21 | WT | 0.6 |
| 1821 | s21 | WT | 0.65 |
| 1822 | s21 | SNP | 0.6 |
| 1823 | s21 | SNP | 0.6 |
| 1824 | s21 | WT | 0.65 |
| 1825 | s21 | WT | 0.65 |
| 1826 | s21 | SNP | 0.6 |
| 1827 | s21 | SNP | 0.55 |
| 1828 | s21 | WT | 0.6 |
| 1829 | s21 | SNP | 0.55 |
| 1830 | s21 | SNP | 0.55 |
| 1831 | s21 | WT | 0.6 |
| 1832 | s21 | WT | 0.65 |
| 1833 | s21 | SNP | 0.6 |
| 1834 | s21 | SNP | 0.6 |
| 1835 | s21 | WT | 0.65 |
| 1836 | s21 | SNP | 0.55 |
| 1837 | s21 | WT | 0.6 |
| 1838 | s21 | WT | 0.6 |
| 1839 | s21 | SNP | 0.55 |
| 1840 | s21 | SNP | 0.55 |
| 1841 | s21 | WT | 0.6 |
| 1842 | s21 | WT | 0.65 |
| 1843 | s21 | WT | 0.65 |
| 1844 | s21 | SNP | 0.6 |
| 1845 | s21 | SNP | 0.6 |
| 1846 | s21 | WT | 0.65 |
| 1847 | s21 | WT | 0.55 |
| 1848 | s21 | SNP | 0.6 |
| 1849 | s21 | WT | 0.65 |
| 1850 | s21 | WT | 0.65 |
| 1851 | s21 | SNP | 0.6 |
| 1852 | s21 | SNP | 0.6 |
| 1853 | s21 | SNP | 0.55 |
| 1854 | s21 | WT | 0.6 |
| 1855 | s21 | WT | 0.6 |
| 1856 | s21 | SNP | 0.55 |
| 1857 | s21 | WT | 0.65 |
| 1858 | s21 | SNP | 0.6 |
| 1859 | s21 | SNP | 0.55 |
| 1860 | s21 | WT | 0.6 |
| 1861 | s21 | SNP | 0.5 |
| 1862 | s21 | WT | 0.55 |
| 1863 | s21 | SNP | 0.5 |
| 1864 | s21 | WT | 0.55 |
| 1865 | s21 | WT | 0.55 |
| 1866 | s21 | SNP | 0.5 |
| 1867 | s22 | WT | 0.35 |
| 1868 | s22 | SNP | 0.3 |
| 1869 | s22 | SNP | 0.4 |
| 1870 | s22 | WT | 0.4 |
| 1871 | s22 | SNP | 0.35 |
| 1872 | s22 | SNP | 0.45 |
| 1873 | s22 | WT | 0.45 |
| 1874 | s22 | WT | 0.45 |
| 1875 | s22 | SNP | 0.4 |
| 1876 | s22 | SNP | 0.4 |
| 1877 | s22 | WT | 0.45 |
| 1878 | s22 | WT | 0.4 |
| 1879 | s22 | SNP | 0.35 |
| 1880 | s22 | WT | 0.35 |
| 1881 | s22 | SNP | 0.3 |
| 1882 | s22 | WT | 0.5 |
| 1883 | s22 | SNP | 0.45 |
| 1884 | s22 | WT | 0.4 |
| 1885 | s22 | SNP | 0.35 |
| 1886 | s22 | SNP | 0.4 |
| 1887 | s22 | WT | 0.45 |
| 1888 | s22 | WT | 0.45 |
| 1889 | s22 | WT | 0.4 |
| 1890 | s22 | SNP | 0.35 |
| 1891 | s22 | SNP | 0.4 |
| 1892 | s22 | WT | 0.45 |
| 1893 | s22 | SNP | 0.35 |
| 1894 | s22 | WT | 0.4 |
| 1895 | s22 | WT | 0.5 |
| 1896 | s22 | WT | 0.35 |
| 1897 | s22 | SNP | 0.3 |
| 1898 | s22 | SNP | 0.4 |
| 1899 | s22 | WT | 0.45 |
| 1900 | s22 | SNP | 0.35 |
| 1901 | s22 | WT | 0.4 |
| 1902 | s22 | WT | 0.45 |
| 1903 | s22 | SNP | 0.4 |
| 1904 | s22 | SNP | 0.3 |
| 1905 | s22 | WT | 0.35 |
| 1906 | s22 | WT | 0.45 |
| 1907 | s22 | SNP | 0.4 |
| 1908 | s22 | SNP | 0.4 |
| 1909 | s22 | WT | 0.45 |
| 1910 | s22 | WT | 0.45 |
| 1911 | s22 | SNP | 0.4 |
| 1912 | s22 | WT | 0.45 |
| 1913 | s22 | SNP | 0.4 |
| 1914 | s22 | WT | 0.45 |
| 1915 | s22 | WT | 0.35 |
| 1916 | s22 | SNP | 0.3 |
| 1917 | s22 | SNP | 0.35 |
| 1918 | s22 | WT | 0.4 |
| 1919 | s22 | WT | 0.45 |
| 1920 | s22 | SNP | 0.4 |
| 1921 | s22 | SNP | 0.4 |
| 1922 | s22 | SNP | 0.4 |
| 1923 | s22 | WT | 0.45 |
| 1924 | s22 | SNP | 0.35 |
| 1925 | s22 | WT | 0.4 |
| 1926 | s22 | SNP | 0.4 |
| 1927 | s22 | SNP | 0.35 |
| 1928 | s22 | WT | 0.4 |
| 1929 | s23 | SNP | 0.45 |
| 1930 | s23 | SNP | 0.35 |
| 1931 | s23 | WT | 0.35 |
| 1932 | s23 | SNP | 0.4 |
| 1933 | s23 | WT | 0.4 |
| 1934 | s23 | SNP | 0.5 |
| 1935 | s23 | WT | 0.4 |
| 1936 | s23 | SNP | 0.4 |
| 1937 | s23 | SNP | 0.4 |
| 1938 | s23 | WT | 0.4 |
| 1939 | s23 | WT | 0.45 |
| 1940 | s23 | WT | 0.4 |
| 1941 | s23 | SNP | 0.45 |
| 1942 | s23 | WT | 0.45 |
| 1943 | s23 | WT | 0.4 |
| 1944 | s23 | SNP | 0.4 |
| 1945 | s23 | WT | 0.4 |
| 1946 | s23 | SNP | 0.4 |
| 1947 | s23 | WT | 0.45 |
| 1948 | s23 | SNP | 0.45 |
| 1949 | s23 | WT | 0.45 |
| 1950 | s23 | SNP | 0.45 |
| 1951 | s23 | WT | 0.5 |
| 1952 | s23 | SNP | 0.5 |
| 1953 | s23 | WT | 0.45 |
| 1954 | s23 | SNP | 0.45 |
| 1955 | s23 | WT | 0.5 |
| 1956 | s23 | SNP | 0.5 |
| 1957 | s23 | WT | 0.45 |
| 1958 | s23 | SNP | 0.45 |
| 1959 | s23 | WT | 0.35 |
| 1960 | s23 | SNP | 0.45 |
| 1961 | s23 | WT | 0.45 |
| 1962 | s23 | SNP | 0.35 |
| 1963 | s23 | SNP | 0.45 |
| 1964 | s23 | WT | 0.45 |
| 1965 | s23 | SNP | 0.5 |
| 1966 | s23 | WT | 0.5 |
| 1967 | s23 | WT | 0.4 |
| 1968 | s23 | SNP | 0.4 |
| 1969 | s23 | WT | 0.5 |
| 1970 | s23 | WT | 0.35 |
| 1971 | s23 | WT | 0.5 |
| 1972 | s23 | SNP | 0.5 |
| 1973 | s23 | SNP | 0.5 |
| 1974 | s23 | WT | 0.5 |
| 1975 | s23 | WT | 0.45 |
| 1976 | s23 | SNP | 0.45 |
| 1977 | s23 | SNP | 0.45 |
| 1978 | s23 | WT | 0.45 |
| 1979 | s23 | WT | 0.45 |
| 1980 | s23 | SNP | 0.45 |
| 1981 | s23 | SNP | 0.4 |
| 1982 | s23 | SNP | 0.35 |
| 1983 | s23 | WT | 0.4 |
| 1984 | s23 | SNP | 0.4 |

[0182] Examples are provided below to facilitate a more complete understanding of the invention. The following examples illustrate the exemplary modes of making and practicing the invention. However, the scope of the invention is not limited to specific embodiments disclosed in these Examples, which are for purposes of illustration only.

### EXPERIMENTAL DETAILS

### Example 1: FGA Correction Strategies

[0183] Two strategies are proposed to tackle the Fibrinogen amyloidosis at a genomic DNA level. In the first indels are introduced on rs6050 SNP resulting with truncated protein without the putative amyloid forming region. (FIG. 10A). In the second exclusion of the coiled-coil domain or FGA Exon 5 by knock-out is effected with two RNA molecules. (FIG. 10B). One guide targets a SNP and the second guide a sequence common to both alleles. The first guide targets a SNP/SEQ in either Intron 4, Intron2, 5′UTR, or promoter region while a second guide targets a sequence in Intron 5, a common region to both transcripts.

[0184] When using SpCas9, 24 different guide sequences, identified as gFGA 1 through gFGA 24, identified by SEQ ID NO. in Table 3, are screened for high on target activity using spCas9 in HeLa cells. In brief, spCas9 coding plasmid (390 ng) is co-transfected with each of the guide sequence expression plasmids (120 ng) in 24 well plate format using Turbofect reagent (Thermo fisher scientific). Cells are harvested 72 h post DNA transfection. On target activity is determined by DNA capillary electrophoresis. According to DNA capillary electrophoresis analysis, either gFGA16 or gFGA18 which target rs6050 SNP and show activity of ˜30-40%, can be used for correction utilizing the first strategy. (FIG. 11A). gFGA12 and gFGA22 that target rs2070018 and Intron 5, respectively, show activity of ˜50-60%, and can be used for Exon 5 excision in the second strategy. (FIG. 11A).

[0185] To test Exon 5 excision rate using gFGA12 and gFGA22, spCas9 coding plasmid (390 ng) is co-transfected with gFGA12 and gFGA22 plasmids (60 ng of each) in 24 well plate format using Turbofect reagent (Thermo fisher scientific). Cells are harvested 72 h post DNA transfection. Genomic DNA is extracted using EZNA tissue DNA kit (Omega). On target activity is determined by DNA capillary electrophoresis. (FIG. 11C). To determine the excision rate, genomic DNAs of treated and non-treated cells are subjected to RT-PCR using FAST SYBR mix (Applied bio-systems) and primers for FGA Exon 5, FGA Exon 6 and GAPDH, as shown in Table 4, which serves as an endogenous control. The data shows a decrease of approximately 60% in Exon 5 levels of treated cells, while no significant change is detected in Exon 6 levels. (FIG. 11D).

TABLE 3
gFGA1 through gFGA24 of Example 1 as
identified by SEQ ID NO.

| | Example 1 | SEQ |
|---|---|---|
| Guide sequence | gFGA ID | ID NO: |
| CUUUUCUUUAUUUGCUAUGU | gFGA1 | 162 |
| CAGCAAUCCUUUCUUUCAGC | gFGA2 | 117 |
| ACAGACAAAUACUGCUUAGC | gFGA3 | 87 |
| UUGAAUGUUUACUAAGUCUU | gFGA4 | 115 |
| AUUGAAUGUUUACUAAGUCU | gFGA5 | 109 |
| AGUCCUUGUGCCUUGGCCUC | gFGA6 | 142 |
| UUGUGCCAGUCCUUGUGCCU | gFGA7 | 158 |
| UGAGGCCAAGGCACAAGGAC | gFGA8 | 155 |
| CUACAUAGCAAAUAAAGAAA | gFGA9 | 161 |
| UUAGCCAUAAAUUAGGUGCC | gFGA10 | 215 |
| GCACCUAAUUUAUGGCUAAG | gFGAll | 202 |
| ACUCAGAAACAAGGACAUCU | gFGA12 | 219 |
| AUGUCCUUGUUUCUGAGUAG | gFGA13 | 222 |
| UUCCACUGAGGGUGCUCGAU | gFGA14 | 1985 |
| UGCCUAUCGAGCACCCUCAG | gFGA15 | 1986 |
| UUCCAGCUUCCAGUACUUCC | gFGA16 | 141 |
| AGCUCUGGACCUGGAAGUAC | gFGA17 | 124 |
| GACCUGGAAGUACUGGAAGC | gFGA18 | 132 |
| AGUACUGGAAGCUGGAACUC | gFGA19 | 126 |
| GUACUGGAAGCUGGAACUCU | gFGA20 | 136 |
| AAGGAAAUGCAAGGGGCCAU | gFGA21 | 1987 |
| AGUCAUGGCUCUGUACUGUU | gFGA22 | 1988 |
| UUAACUUAGUCUAGGGGGAC | gFGA23 | 1989 |
| CGUGUAACAGAGAGUUAAGA | gFGA24 | 1990 |

TABLE 4
Primers used for RT-PCR analysis
of Example 1

FGA Exon6-F-TGATGCTCTGATTGAGGGTTCC
(SEQ ID NO: 1991)
FGA Exon6-R-AGGTGCTGAACTGCATGTTG
(SEQ ID NO: 1992)
FGA Exon5-F-ACATGCCGCAGATGAGAATG
(SEQ ID NO: 1993)
FGA Exon5-R-TTTCCGTCTCTGATCCGGTTC
(SEQ ID NO: 1994)
GAPDH-F-CACACACATGCACTTACCTGTG
(SEQ ID NO: 1995)
GAPDH-R-ATTTGCCAAGTTGCCTGTCC
(SEQ ID NO: 1996)

### Example 2: FGA Correction Analysis

[0186] Guide sequences comprising 17-20 nucleotides in the sequences of 17-20 contiguous nucleotides set forth in SEQ ID NOs: 1-1990 are screened for high on target activity. On target activity is determined by DNA capillary electrophoresis analysis.

[0187] 5 According to DNA capillary electrophoresis analysis, guide sequences comprising 17-20 nucleotides in the sequences of 17-20 contiguous nucleotides set forth in SEQ ID NOs: 1-1990 are found to be suitable for correction of the FGA gene.

### Discussion

[0188] The guide sequences of the present invention are determined to be suitable for targeting the FGA gene.

### REFERENCES

[0189] 1. Ahmad and Allen (1992) “Antibody-mediated Specific Binging and Cytotoxicity of Lipsome-entrapped Doxorubicin to Lung Cancer Cells in Vitro”, Cancer Research 52:4817-20
[0190] 2. Anders (1992) “Human gene therapy”, Science 256:808-13
[0191] 3. Basha et al. (2011) “Influence of Cationic Lipid Composition on Gene Silencing Properties of Lipid Nanoparticle Formulations of siRNA in Antigen-Presenting Cells”, Mol. Ther. 19(12):2186-200
[0192] 4. Behr (1994) Gene transfer with synthetic cationic amphiphiles: Prospects for gene therapy”, Bioconjuage Chem 5:382-89
[0193] 5. Blaese (1995) “Vectors in cancer therapy: how will they deliver”, Cancer Gene Ther. 2:291-97
[0194] 6. Blaese et al. (1995) “T lympocyte-directed gene therapy for ADA-SCID: initial trial results after 4 years”, Science 270(5235):475-80
[0195] 7. Buchschacher and Panganiban (1992) “Human immunodeficiency virus vectors for inducible expression of foreign genes”, J. Virol. 66:2731-39
[0196] 8. Burstein et al. (2017) “New CRISPR-Cas systems from uncultivated microbes”, Nature 542:237-41
[0197] 9. Chung et al. (2006) “Agrobacterium is not alone: gene transfer to plants by viruses and other bacteria”, Trends Plant Sci. 11(1):1-4
[0198] 10. Coelho et al. (2013) “Safety and Efficacy of RNAi Therapy for Transthyretin Amyloidosis”, N Engl J. Med 369:819-29
[0199] 11. Crystal (1995) “Transfer of genes to humans: early lessons and obstacles to success”, Science 270(5235):404-10
[0200] 12. Dillon (1993) “Regulation gene expression in gene therapy” Trends in Biotechnology 11(5):167-173
[0201] 13. Dranoff et al. (1997) “A phase I study of vaccination with autologous, irradiated melanoma cells engineered to secrete human granulocyte macrophage colony stimulating factor”, Hum. Gene Ther. 8(1):111-23
[0202] 14. Dunbar et al. (1995) “Retrovirally marked CD34-enriched peripheral blood and bone marrow cells contribute to long-term engraftment after autologous transplantation”, Blood 85:3048-57
[0203] 15. Ellem et al. (1997) “A case report: immune responses and clinical course of the first human use of ganulocyte/macrophage-colony-stimulating-factor-tranduced autologous melanoma cells for immunotherapy”, Cancer Immunol Immunother 44:10-20
[0204] 16. Gao and Huang (1995) “Cationic liposome-mediated gene transfer” Gene Ther. 2(10):710-22
[0205] 17. Haddada et al. (1995) “Gene Therapy Using Adenovirus Vectors”, in: The Molecular Repertoire of Adenoviruses III: Biology and Pathogenesis, ed. Doerfler and Böhm, pp. 297-306
[0206] 18. Han et al. (1995) “Ligand-directed retro-viral targeting of human breast cancer cells”, Proc Natl Acad Sci U.S.A. 92(21):9747-51
[0207] 19. Inaba et al. (1992) “Generation of large numbers of dendritic cells from mouse bone marrow cultures supplemented with granulocyte/macrophage colony-stimulating factor”, J Exp Med. 176(6):1693-702
[0208] 20. Jinek et al. (2012) “A programmable dual-RNA-guided DNA endonuclease in adaptive bacterial immunity,” Science 337(6096):816-21
[0209] 21. Johan et al. (1992) “GLVR1, a receptor for gibbon ape leukemia virus, is homologous to a phosphate permease of Neurospora crassa and is expressed at high levels in the brain and thymus”, J Virol 66(3):1635-40
[0210] 22. Judge et al. (2006) “Design of noninflammatory synthetic siRNA mediating potent gene silencing in vivo”, Mol Ther. 13(3):494-505
[0211] 23. Kohn et al. (1995) “Engraftment of gene-modified umbilical cord blood cells in neonates with adnosine deaminase deficiency”, Nature Medicine 1:1017-23
[0212] 24. Kremer and Perricaudet (1995) “Adenovirus and adeno-associated virus mediated gene transfer”, Br. Med. Bull. 51(1):31-44
[0213] 25. Macdiarmid et al. (2009) “Sequential treatment of drug-resistant tumors with targeted minicells containing siRNA or a cytotoxic drug”, Nat Biotehcnol. 27(7):643-51
[0214] 26. Malech et al. (1997) “Prolonged production of NADPH oxidase-corrected granulocyes after gene therapy of chronic granulomatous disease”, PNAS 94(22):12133-38
[0215] 27. Miller et al. (1991) “Construction and properties of retrovirus packaging cells based on gibbon ape leukemia virus”, J Virol. 65(5):2220-24
[0216] 28. Miller (1992) “Human gene therapy comes of age”, Nature 357:455-60
[0217] 29. Mitani and Caskey (1993) “Delivering therapeutic genes-matching approach and application”, Trends in Biotechnology 11(5):162-66
[0218] 30. Nabel and Felgner (1993) “Direct gene transfer for immunotherapy and immunization”, Trends in Biotechnology 11(5):211-15
[0219] 31. Remy et al. (1994) “Gene Transfer with a Series of Lipphilic DNA-Binding Molecules”, Bioconjugate Chem. 5(6):647-54
[0220] 32. Sentmanat et al. (2018) “A Survey of Validation Strategies for CRISPR-Cas9 Editing”, Scientific Reports 8:888, doi:10.1038/s41598-018-19441-8
[0221] 33. Sommerfelt et al. (1990) “Localization of the receptor gene for type D simian retroviruses on human chromosome 19”, J. Virol. 64(12):6214-20
[0222] 34. Van Brunt (1988) “Molecular framing: transgenic animals as bioactors” Biotechnology 6:1149-54
[0223] 35. Vigne et al. (1995) “Third-generation adenovectors for gene therapy”, Restorative Neurology and Neuroscience 8(1,2):35-36
[0224] 36. Wilson et al. (1989) “Formation of infectious hybrid virion with gibbon ape leukemia virus and human T-cell leukemia virus retroviral envelope glycoproteins and the gag and pol proteins of Moloney murine leukemia virus”, J. Virol. 63:2374-78
[0225] 37. Yu et al. (1994) “Progress towards gene therapy for HIV infection”, Gene Ther. 1(1):13-26
[0226] 38. Zetsche et al. (2015) “Cpf1 is a single RNA-guided endonuclease of a class 2 CRIPSR-Cas system” Cell 163(3):759-71
[0227] 39. Zuris et al. (2015) “Cationic lipid-mediated delivery of proteins enables efficient protein based genome editing in vitro and in vivo” Nat Biotechnol. 33(1):73-80

1. An isolated guide RNA molecule comprising a guide sequence portion, wherein the guide sequence portion comprises 17-20 contiguous nucleotides of any one of SEQ ID NOs: 87, 109, 115, 124, 126, 136, 141, 142, 155, 158, 161, 162, 202, 215, 219, or 222, and wherein the guide RNA molecule further comprises:
a) a portion having a sequence which binds to a CRISPR nuclease; or
b) a portion having a tracr mate sequence.

2. The guide RNA molecule of claim 1 further comprising one or more linker portions.

3. A composition comprising the guide RNA molecule of claim 1, the composition further comprising a CRISPR nuclease, wherein if the guide RNA molecule further comprises a portion having a tracr mate sequence, then the composition further comprises a tracrRNA molecule.

4. A method for inactivating a mutant FGA allele in a cell, the method comprising delivering to the cell the composition of claim 3.

5. The method of claim 4, wherein the CRISPR nuclease and the guide RNA molecule are delivered to the cell substantially at the same time or at different times.

6. The method of claim 4, wherein the composition further comprises a tracrRNA molecule, and wherein the tracrRNA is delivered to the cell substantially at the same time or at different times as the CRISPR nuclease and guide RNA molecule.

7. An isolated guide RNA molecule comprising a guide sequence portion, wherein the guide sequence portion comprises 17-20 contiguous nucleotides of any one of SEQ ID NOs: 87, 109, 115, 142, 155, 158, 161, 162, 202, 215, 219, or 222, and wherein the guide RNA molecule further comprises:
a) a portion having a sequence which binds to a CRISPR nuclease; or
b) a portion having a tracr mate sequence.

8. The guide RNA molecule of claim 7 further comprising one or more linker portions.

9. A composition comprising the guide RNA molecule of claim 7, the composition further comprising a CRISPR nuclease, wherein if the guide RNA molecule further comprises a portion having a tracr mate sequence, then the composition further comprises a tracrRNA molecule.

10. A method for inactivating a mutant FGA allele in a cell, the method comprising delivering to the cell the composition of claim 9.

11. The method of claim 10, wherein the CRISPR nuclease and the guide RNA molecule are delivered to the cell substantially at the same time or at different times.

12. The method of claim 10, wherein the composition further comprises a tracrRNA molecule, and wherein the tracrRNA is delivered to the cell substantially at the same time or at different times as the CRISPR nuclease and guide RNA molecule.

13. An isolated guide RNA molecule comprising a guide sequence portion, wherein the guide sequence portion comprises any one of SEQ ID NOs: 1985-1990, and wherein the guide RNA molecule further comprises:
a) a portion having a sequence which binds to a CRISPR nuclease; or
b) a portion having a tracr mate sequence.

14. The guide RNA molecule of claim 13 further comprising one or more linker portions.

15. A composition comprising the guide RNA molecule of claim 13, the composition further comprising a CRISPR nuclease, wherein if the guide RNA molecule further comprises a portion having a tracr mate sequence, then the composition further comprises a tracrRNA molecule.

16. A method for inactivating a mutant FGA allele in a cell, the method comprising delivering to the cell the composition of claim 15.

17. The method of claim 16, wherein the CRISPR nuclease and the guide RNA molecule is delivered to the cell substantially at the same time or at different times.

18. The method of claim 16, wherein the composition further comprises a tracrRNA molecule, and wherein the tracrRNA is delivered to the cell substantially at the same time or at different times as the CRISPR nuclease and guide RNA molecule.

19. The composition of claim 9, wherein the guide RNA molecule comprises 17-20 contiguous nucleotides of SEQ ID NO. 219, and wherein the composition further comprises a second RNA molecule comprising a guide sequence portion, wherein the guide sequence portion of the second RNA molecule comprises 17-20 contiguous nucleotides of SEQ ID NO. 1988.

20. A method for inactivating a mutant FGA allele in a cell, the method comprising delivering to the cell the composition of claim 19.

The application's sequence listing, which the Patent Office published only in electronic form, follows.

SEQUENCE LISTING (1996 sequences)

SEQ ID NO: 1 - RNA, 20 nt, synthetic construct
  misc_feature 1..20: note = synthesized
  source 1..20: mol_type = other RNA
attgactctgcttggttttt

SEQ ID NO: 2 - RNA, 20 nt, synthetic construct
  misc_feature 1..20: note = synthesized
  source 1..20: mol_type = other RNA
ccaggagttataaggtactg

SEQ ID NO: 3 - RNA, 20 nt, synthetic construct
  misc_feature 1..20: note = synthesized
  source 1..20: mol_type = other RNA
gactctgcttggtttttcca

SEQ ID NO: 4 - RNA, 20 nt, synthetic construct
  misc_feature 1..20: note = synthesized
  source 1..20: mol_type = other RNA
gtccaggagttataaggtac

SEQ ID NO: 5 - RNA, 20 nt, synthetic construct
  misc_feature 1..20: note = synthesized
  source 1..20: mol_type = other RNA
cttcagcctattgggtcaca

SEQ ID NO: 6 - RNA, 20 nt, synthetic construct
  misc_feature 1..20: note = synthesized
  source 1..20: mol_type = other RNA
tcagcctattgggtcacaag

SEQ ID NO: 7 - RNA, 20 nt, synthetic construct
  misc_feature 1..20: note = synthesized
  source 1..20: mol_type = other RNA
ttcagcctattgggtcacaa

SEQ ID NO: 8 - RNA, 20 nt, synthetic construct
  misc_feature 1..20: note = synthesized
  source 1..20: mol_type = other RNA
agtgaaatgagcagatatag

SEQ ID NO: 9 - RNA, 20 nt, synthetic construct
  misc_feature 1..20: note = synthesized
  source 1..20: mol_type = other RNA
taaaaagcatgtgacaataa

SEQ ID NO: 10 - RNA, 20 nt, synthetic construct
  misc_feature 1..20: note = synthesized
  source 1..20: mol_type = other RNA
taagtgaaatgagcagatat

SEQ ID NO: 11 - RNA, 20 nt, synthetic construct
  misc_feature 1..20: note = synthesized
  source 1..20: mol_type = other RNA
ttaaaaagcatgtgacaata

SEQ ID NO: 12 - RNA, 20 nt, synthetic construct
  misc_feature 1..20: note = synthesized
  source 1..20: mol_type = other RNA
tttaaaaagcatgtgacaat

SEQ ID NO: 13 - RNA, 20 nt, synthetic construct
  misc_feature 1..20: note = synthesized
  source 1..20: mol_type = other RNA
caagacttagtaaacattca

SEQ ID NO: 14 - RNA, 20 nt, synthetic construct
  misc_feature 1..20: note = synthesized
  source 1..20: mol_type = other RNA
aggatgggaactaggagtgg

SEQ ID NO: 15 - RNA, 20 nt, synthetic construct
  misc_feature 1..20: note = synthesized
  source 1..20: mol_type = other RNA
ataggatgggaactaggagt

SEQ ID NO: 16 - RNA, 20 nt, synthetic construct
  misc_feature 1..20: note = synthesized
  source 1..20: mol_type = other RNA
ctccagctgaaagaaaggat

SEQ ID NO: 17 - RNA, 20 nt, synthetic construct
  misc_feature 1..20: note = synthesized
  source 1..20: mol_type = other RNA
ggatgggaactaggagtggc

SEQ ID NO: 18 - RNA, 20 nt, synthetic construct
  misc_feature 1..20: note = synthesized
  source 1..20: mol_type = other RNA
acttctctagcaaagaagac

SEQ ID NO: 19 - RNA, 20 nt, synthetic construct
  misc_feature 1..20: note = synthesized
  source 1..20: mol_type = other RNA
agcactctgtcttctttgct

SEQ ID NO: 20 - RNA, 20 nt, synthetic construct
  misc_feature 1..20: note = synthesized
  source 1..20: mol_type = other RNA
cactctgtcttctttgctag

SEQ ID NO: 21 - RNA, 20 nt, synthetic construct
  misc_feature 1..20: note = synthesized
  source 1..20: mol_type = other RNA
ctccacttctctagcaaaga

SEQ ID NO: 22 - RNA, 20 nt, synthetic construct
  misc_feature 1..20: note = synthesized
  source 1..20: mol_type = other RNA
ctctccacttctctagcaaa

SEQ ID NO: 23 - RNA, 20 nt, synthetic construct
  misc_feature 1..20: note = synthesized
  source 1..20: mol_type = other RNA
cttctttgctagagaagtgg

SEQ ID NO: 24 - RNA, 20 nt, synthetic construct
  misc_feature 1..20: note = synthesized
  source 1..20: mol_type = other RNA
ctttgctagagaagtggaga

SEQ ID NO: 25 - RNA, 20 nt, synthetic construct
  misc_feature 1..20: note = synthesized
  source 1..20: mol_type = other RNA
gtcttctttgctagagaagt

SEQ ID NO: 26 - RNA, 20 nt, synthetic construct
  misc_feature 1..20: note = synthesized
  source 1..20: mol_type = other RNA
tctctccacttctctagcaa

SEQ ID NO: 27 - RNA, 20 nt, synthetic construct
  misc_feature 1..20: note = synthesized
  source 1..20: mol_type = other RNA
tctgtcttctttgctagaga

SEQ ID NO: 28 - RNA, 20 nt, synthetic construct
  misc_feature 1..20: note = synthesized
  source 1..20: mol_type = other RNA
tctttgctagagaagtggag

SEQ ID NO: 29 - RNA, 20 nt, synthetic construct
  misc_feature 1..20: note = synthesized
  source 1..20: mol_type = other RNA
tgtcttctttgctagagaag

SEQ ID NO: 30 - RNA, 20 nt, synthetic construct
  misc_feature 1..20: note = synthesized
  source 1..20: mol_type = other RNA
ttctctagcaaagaagacag

SEQ ID NO: 31 - RNA, 20 nt, synthetic construct
  misc_feature 1..20: note = synthesized
  source 1..20: mol_type = other RNA
aggtaagaggactagttaga

SEQ ID NO: 32 - RNA, 20 nt, synthetic construct
  misc_feature 1..20: note = synthesized
  source 1..20: mol_type = other RNA
ccctcattccagagtttctc

SEQ ID NO: 33 - RNA, 20 nt, synthetic construct
  misc_feature 1..20: note = synthesized
  source 1..20: mol_type = other RNA
ctcattccagagtttctctg

SEQ ID NO: 34 - RNA, 20 nt, synthetic construct
  misc_feature 1..20: note = synthesized
  source 1..20: mol_type = other RNA
ataagtgggttccagagatg

SEQ ID NO: 35 - RNA, 20 nt, synthetic construct
  misc_feature 1..20: note = synthesized
  source 1..20: mol_type = other RNA
gcataagtgggttccagaga

SEQ ID NO: 36 - RNA, 20 nt, synthetic construct
  misc_feature 1..20: note = synthesized
  source 1..20: mol_type = other RNA
ggggaggcagccaggcaact

SEQ ID NO: 37 - RNA, 20 nt, synthetic construct
  misc_feature 1..20: note = synthesized
  source 1..20: mol_type = other RNA
cctctctccttccttctttg

SEQ ID NO: 38 - RNA, 20 nt, synthetic construct
  misc_feature 1..20: note = synthesized
  source 1..20: mol_type = other RNA
ctctctccttccttctttga

SEQ ID NO: 39 - RNA, 20 nt, synthetic construct
  misc_feature 1..20: note = synthesized
  source 1..20: mol_type = other RNA
tctctccttccttctttgag

SEQ ID NO: 40 - RNA, 20 nt, synthetic construct
  misc_feature 1..20: note = synthesized
  source 1..20: mol_type = other RNA
cattagtgggtgaacagaca

SEQ ID NO: 41 - RNA, 20 nt, synthetic construct
  misc_feature 1..20: note = synthesized
  source 1..20: mol_type = other RNA
ctgggagctctggacctgga

SEQ ID NO: 42 - RNA, 20 nt, synthetic construct
  misc_feature 1..20: note = synthesized
  source 1..20: mol_type = other RNA
cacaaagcttcctgaggcca

SEQ ID NO: 43 - RNA, 20 nt, synthetic construct
  misc_feature 1..20: note = synthesized
  source 1..20: mol_type = other RNA
attgaatagttacctacata

SEQ ID NO: 44 - RNA, 20 nt, synthetic construct
  misc_feature 1..20: note = synthesized
  source 1..20: mol_type = other RNA
attatgattttgggtggtat

SEQ ID NO: 45 - RNA, 20 nt, synthetic construct
  misc_feature 1..20: note = synthesized
  source 1..20: mol_type = other RNA
attggtttgagaacttctct

SEQ ID NO: 46 - RNA, 20 nt, synthetic construct
  misc_feature 1..20: note = synthesized
  source 1..20: mol_type = other RNA
cattatgattttgggtggta

SEQ ID NO: 47 - RNA, 20 nt, synthetic construct
  misc_feature 1..20: note = synthesized
  source 1..20: mol_type = other RNA
aaaaagaaaaagccaatgca

SEQ ID NO: 48 - RNA, 20 nt, synthetic construct
  misc_feature 1..20: note = synthesized
  source 1..20: mol_type = other RNA
tcaaaaagaaaaagccaatg

SEQ ID NO: 49 - RNA, 20 nt, synthetic construct
  misc_feature 1..20: note = synthesized
  source 1..20: mol_type = other RNA
ttgcttaaattataatctgc

SEQ ID NO: 50 - RNA, 20 nt, synthetic construct
  misc_feature 1..20: note = synthesized
  source 1..20: mol_type = other RNA
atgagggtccacttagccat

SEQ ID NO: 51 - RNA, 20 nt, synthetic construct
  misc_feature 1..20: note = synthesized
  source 1..20: mol_type = other RNA
aggagagtttgtcagtgaga

SEQ ID NO: 52 - RNA, 20 nt, synthetic construct
  misc_feature 1..20: note = synthesized
  source 1..20: mol_type = other RNA
ccagattctgagcccctaga

SEQ ID NO: 53 - RNA, 20 nt, synthetic construct
  misc_feature 1..20: note = synthesized
  source 1..20: mol_type = other RNA
ggagagtttgtcagtgagac

SEQ ID NO: 54 - RNA, 20 nt, synthetic construct
  misc_feature 1..20: note = synthesized
  source 1..20: mol_type = other RNA
ccttccttttccctctactc

SEQ ID NO: 55 - RNA, 20 nt, synthetic construct
  misc_feature 1..20: note = synthesized
  source 1..20: mol_type = other RNA
ggtcccagatgtccttgttt

SEQ ID NO: 56 - RNA, 20 nt, synthetic construct
  misc_feature 1..20: note = synthesized
  source 1..20: mol_type = other RNA
ccttccctctgatgctagag

SEQ ID NO: 57 - RNA, 20 nt, synthetic construct
  misc_feature 1..20: note = synthesized
  source 1..20: mol_type = other RNA
tccttccctctgatgctaga

SEQ ID NO: 58 - RNA, 20 nt, synthetic construct
  misc_feature 1..20: note = synthesized
  source 1..20: mol_type = other RNA
ttccctctgatgctagaggg

SEQ ID NO: 59 - RNA, 20 nt, synthetic construct
  misc_feature 1..20: note = synthesized
  source 1..20: mol_type = other RNA
actaagtcttgggttctttg

SEQ ID NO: 60 - RNA, 20 nt, synthetic construct
  misc_feature 1..20: note = synthesized
  source 1..20: mol_type = other RNA
atcaggtaccctgcaaaatg

SEQ ID NO: 61 - RNA, 20 nt, synthetic construct
  misc_feature 1..20: note = synthesized
  source 1..20: mol_type = other RNA
taagtcttgggttctttgct

SEQ ID NO: 62 - RNA, 20 nt, synthetic construct
  misc_feature 1..20: note = synthesized
  source 1..20: mol_type = other RNA
gccaacttatctggaagaga

SEQ ID NO: 63 - RNA, 20 nt, synthetic construct
  misc_feature 1..20: note = synthesized
  source 1..20: mol_type = other RNA
taagccaacttatctggaag

SEQ ID NO: 64 - RNA, 20 nt, synthetic construct
  misc_feature 1..20: note = synthesized
  source 1..20: mol_type = other RNA
ctgagtctaggggctcagaa

SEQ ID NO: 65 - RNA, 20 nt, synthetic construct
  misc_feature 1..20: note = synthesized
  source 1..20: mol_type = other RNA
ctgtgtctaggggctcagaa

SEQ ID NO: 66 - RNA, 20 nt, synthetic construct
  misc_feature 1..20: note = synthesized
  source 1..20: mol_type = other RNA
gagactgagtctaggggctc

SEQ ID NO: 67 - RNA, 20 nt, synthetic construct
  misc_feature 1..20: note = synthesized
  source 1..20: mol_type = other RNA
gagactgtgtctaggggctc

SEQ ID NO: 68 - RNA, 20 nt, synthetic construct
  misc_feature 1..20: note = synthesized
  source 1..20: mol_type = other RNA
gagcccctagacacagtctc

SEQ ID NO: 69 - RNA, 20 nt, synthetic construct
  misc_feature 1..20: note = synthesized
  source 1..20: mol_type = other RNA
gagcccctagactcagtctc

SEQ ID NO: 70 - RNA, 20 nt, synthetic construct
  misc_feature 1..20: note = synthesized
  source 1..20: mol_type = other RNA
gagtctaggggctcagaatc

SEQ ID NO: 71 - RNA, 20 nt, synthetic construct
  misc_feature 1..20: note = synthesized
  source 1..20: mol_type = other RNA
gcccctagacacagtctcac

SEQ ID NO: 72 - RNA, 20 nt, synthetic construct
  misc_feature 1..20: note = synthesized
  source 1..20: mol_type = other RNA
gcccctagactcagtctcac

SEQ ID NO: 73 - RNA, 20 nt, synthetic construct
  misc_feature 1..20: note = synthesized
  source 1..20: mol_type = other RNA
gtcagtgagactgagtctag

SEQ ID NO: 74 - RNA, 20 nt, synthetic construct
  misc_feature 1..20: note = synthesized
  source 1..20: mol_type = other RNA
gtcagtgagactgtgtctag

SEQ ID NO: 75 - RNA, 20 nt, synthetic construct
  misc_feature 1..20: note = synthesized
  source 1..20: mol_type = other RNA
gtgtctaggggctcagaatc

SEQ ID NO: 76 - RNA, 20 nt, synthetic construct
  misc_feature 1..20: note = synthesized
  source 1..20: mol_type = other RNA
tgagactgagtctaggggct

SEQ ID NO: 77 - RNA, 20 nt, synthetic construct
  misc_feature 1..20: note = synthesized
  source 1..20: mol_type = other RNA
tgagactgtgtctaggggct

SEQ ID NO: 78 - RNA, 20 nt, synthetic construct
  misc_feature 1..20: note = synthesized
  source 1..20: mol_type = other RNA
tgtcagtgagactgagtcta

SEQ ID NO: 79 - RNA, 20 nt, synthetic construct
  misc_feature 1..20: note = synthesized
  source 1..20: mol_type = other RNA
tgtcagtgagactgtgtcta

SEQ ID NO: 80 - RNA, 20 nt, synthetic construct
  misc_feature 1..20: note = synthesized
  source 1..20: mol_type = other RNA
ttgtcagtgagactgagtct

SEQ ID NO: 81 - RNA, 20 nt, synthetic construct
  misc_feature 1..20: note = synthesized
  source 1..20: mol_type = other RNA
ttgtcagtgagactgtgtct

SEQ ID NO: 82 - RNA, 20 nt, synthetic construct
  misc_feature 1..20: note = synthesized
  source 1..20: mol_type = other RNA
aaagacaaatactgcttagc

SEQ ID NO: 83 - RNA, 20 nt, synthetic construct
  misc_feature 1..20: note = synthesized
  source 1..20: mol_type = other RNA
aaatgagcagatatagaaag

SEQ ID NO: 84 - RNA, 20 nt, synthetic construct
  misc_feature 1..20: note = synthesized
  source 1..20: mol_type = other RNA
aaatgagcagatatagacag

SEQ ID NO: 85 - RNA, 20 nt, synthetic construct
  misc_feature 1..20: note = synthesized
  source 1..20: mol_type = other RNA
acaataagcgtatctttaaa

SEQ ID NO: 86 - RNA, 20 nt, synthetic construct
  misc_feature 1..20: note = synthesized
  source 1..20: mol_type = other RNA
acaataagggtatctttaaa

SEQ ID NO: 87 - RNA, 20 nt, synthetic construct
  misc_feature 1..20: note = synthesized
  source 1..20: mol_type = other RNA
acagacaaatactgcttagc

SEQ ID NO: 88 - RNA, 20 nt, synthetic construct
  misc_feature 1..20: note = synthesized
  source 1..20: mol_type = other RNA
acatttaaagatacccttat

SEQ ID NO: 89 - RNA, 20 nt, synthetic construct
  misc_feature 1..20: note = synthesized
  source 1..20: mol_type = other RNA
acatttaaagatacgcttat

SEQ ID NO: 90 - RNA, 20 nt, synthetic construct
  misc_feature 1..20: note = synthesized
  source 1..20: mol_type = other RNA
acttcaaaaagatagatata

SEQ ID NO: 91 - RNA, 20 nt, synthetic construct
  misc_feature 1..20: note = synthesized
  source 1..20: mol_type = other RNA
acttcaaaaggatagatata

SEQ ID NO: 92 - RNA, 20 nt, synthetic construct
  misc_feature 1..20: note = synthesized
  source 1..20: mol_type = other RNA
agaaagacaaatactgctta

SEQ ID NO: 93 - RNA, 20 nt, synthetic construct
  misc_feature 1..20: note = synthesized
  source 1..20: mol_type = other RNA
agacagacaaatactgctta

SEQ ID NO: 94 - RNA, 20 nt, synthetic construct
  misc_feature 1..20: note = synthesized
  source 1..20: mol_type = other RNA
atctatccttttgaagttaa

SEQ ID NO: 95 - RNA, 20 nt, synthetic construct
  misc_feature 1..20: note = synthesized
  source 1..20: mol_type = other RNA
atctatctttttgaagttaa

SEQ ID NO: 96 - RNA, 20 nt, synthetic construct
  misc_feature 1..20: note = synthesized
  source 1..20: mol_type = other RNA
attacattaacttcaaaaag

SEQ ID NO: 97 - RNA, 20 nt, synthetic construct
  misc_feature 1..20: note = synthesized
  source 1..20: mol_type = other RNA
attacattaacttcaaaagg

SEQ ID NO: 98 - RNA, 20 nt, synthetic construct
  misc_feature 1..20: note = synthesized
  source 1..20: mol_type = other RNA
ccttttgaagttaatgtaat

SEQ ID NO: 99 - RNA, 20 nt, synthetic construct
  misc_feature 1..20: note = synthesized
  source 1..20: mol_type = other RNA
ctttttgaagttaatgtaat

SEQ ID NO: 100 - RNA, 20 nt, synthetic construct
  misc_feature 1..20: note = synthesized
  source 1..20: mol_type = other RNA
gtttgatatatctatccttt

SEQ ID NO: 101 - RNA, 20 nt, synthetic construct
  misc_feature 1..20: note = synthesized
  source 1..20: mol_type = other RNA
gtttgatatatctatctttt

SEQ ID NO: 102 - RNA, 20 nt, synthetic construct
  misc_feature 1..20: note = synthesized
  source 1..20: mol_type = other RNA
tacattaacttcaaaaagat

SEQ ID NO: 103 - RNA, 20 nt, synthetic construct
  misc_feature 1..20: note = synthesized
  source 1..20: mol_type = other RNA
tacattaacttcaaaaggat

SEQ ID NO: 104 - RNA, 20 nt, synthetic construct
  misc_feature 1..20: note = synthesized
  source 1..20: mol_type = other RNA
tgaaatgagcagatatagaa

SEQ ID NO: 105 - RNA, 20 nt, synthetic construct
  misc_feature 1..20: note = synthesized
  source 1..20: mol_type = other RNA
tgaaatgagcagatatagac

SEQ ID NO: 106 - RNA, 20 nt, synthetic construct
  misc_feature 1..20: note = synthesized
  source 1..20: mol_type = other RNA
ttcaaaaagatagatatatc

SEQ ID NO: 107 - RNA, 20 nt, synthetic construct
  misc_feature 1..20: note = synthesized
  source 1..20: mol_type = other RNA
ttcaaaaggatagatatatc

SEQ ID NO: 108 - RNA, 20 nt, synthetic construct
  misc_feature 1..20: note = synthesized
  source 1..20: mol_type = other RNA
actgaatgtttactaagtct

SEQ ID NO: 109 - RNA, 20 nt, synthetic construct
  misc_feature 1..20: note = synthesized
  source 1..20: mol_type = other RNA
attgaatgtttactaagtct

SEQ ID NO: 110 - RNA, 20 nt, synthetic construct
  misc_feature 1..20: note = synthesized
  source 1..20: mol_type = other RNA
ctgaatgtttactaagtctt

SEQ ID NO: 111 - RNA, 20 nt, synthetic construct
  misc_feature 1..20: note = synthesized
  source 1..20: mol_type = other RNA
gagtaatagctaatgtgtac

SEQ ID NO: 112 - RNA, 20 nt, synthetic construct
  misc_feature 1..20: note = synthesized
  source 1..20: mol_type = other RNA
gagtaatagctaatgtgtat

SEQ ID NO: 113 - RNA, 20 nt, synthetic construct
  misc_feature 1..20: note = synthesized
  source 1..20: mol_type = other RNA
taatgtgtactgaatgttta

SEQ ID NO: 114 - RNA, 20 nt, synthetic construct
  misc_feature 1..20: note = synthesized
  source 1..20: mol_type = other RNA
taatgtgtattgaatgttta

SEQ ID NO: 115 - RNA, 20 nt, synthetic construct
  misc_feature 1..20: note = synthesized
  source 1..20: mol_type = other RNA
ttgaatgtttactaagtctt

SEQ ID NO: 116 - RNA, 20 nt, synthetic construct
  misc_feature 1..20: note = synthesized
  source 1..20: mol_type = other RNA
agcaatcctttctttcagct

SEQ ID NO: 117 - RNA, 20 nt, synthetic construct
  misc_feature 1..20: note = synthesized
  source 1..20: mol_type = other RNA
cagcaatcctttctttcagc

SEQ ID NO: 118 - RNA, 20 nt, synthetic construct
  misc_feature 1..20: note = synthesized
  source 1..20: mol_type = other RNA
cggcaatcctttctttcagc

SEQ ID NO: 119 - RNA, 20 nt, synthetic construct
  misc_feature 1..20: note = synthesized
  source 1..20: mol_type = other RNA
ggattgccgccactcctagt

SEQ ID NO: 120 - RNA, 20 nt, synthetic construct
  misc_feature 1..20: note = synthesized
  source 1..20: mol_type = other RNA
ggattgctgccactcctagt

SEQ ID NO: 121 - RNA, 20 nt, synthetic construct
  misc_feature 1..20: note = synthesized
  source 1..20: mol_type = other RNA
ggcaatcctttctttcagct

SEQ ID NO: 122 - RNA, 20 nt, synthetic construct
  misc_feature 1..20: note = synthesized
  source 1..20: mol_type = other RNA
acctggaagtactggaagct

SEQ ID NO: 123 - RNA, 20 nt, synthetic construct
  misc_feature 1..20: note = synthesized
  source 1..20: mol_type = other RNA
acctggaagtgctggaagct

SEQ ID NO: 124 - RNA, 20 nt, synthetic construct
  misc_feature 1..20: note = synthesized
  source 1..20: mol_type = other RNA
agctctggacctggaagtac

SEQ ID NO: 125 - RNA, 20 nt, synthetic construct
  misc_feature 1..20: note = synthesized
  source 1..20: mol_type = other RNA
agctctggacctggaagtgc

SEQ ID NO: 126 - RNA, 20 nt, synthetic construct
  misc_feature 1..20: note = synthesized
  source 1..20: mol_type = other RNA
agtactggaagctggaactc

SEQ ID NO: 127 - RNA, 20 nt, synthetic construct
  misc_feature 1..20: note = synthesized
  source 1..20: mol_type = other RNA
agtgctggaagctggaactc

SEQ ID NO: 128 - RNA, 20 nt, synthetic construct
  misc_feature 1..20: note = synthesized
  source 1..20: mol_type = other RNA
agttccagcttccagcactt

SEQ ID NO: 129 - RNA, 20 nt, synthetic construct
  misc_feature 1..20: note = synthesized
  source 1..20: mol_type = other RNA
agttccagcttccagtactt

SEQ ID NO: 130 - RNA, 20 nt, synthetic construct
  misc_feature 1..20: note = synthesized
  source 1..20: mol_type = other RNA
cttccagcacttccaggtcc

SEQ ID NO: 131 - RNA, 20 nt, synthetic construct
  misc_feature 1..20: note = synthesized
  source 1..20: mol_type = other RNA
cttccagtacttccaggtcc

SEQ ID NO: 132 - RNA, 20 nt, synthetic construct
  misc_feature 1..20: note = synthesized
  source 1..20: mol_type = other RNA
gacctggaagtactggaagc

SEQ ID NO: 133 - RNA, 20 nt, synthetic construct
  misc_feature 1..20: note = synthesized
  source 1..20: mol_type = other RNA
gacctggaagtgctggaagc

SEQ ID NO: 134 - RNA, 20 nt, synthetic construct
  misc_feature 1..20: note = synthesized
  source 1..20: mol_type = other RNA
gctctggacctggaagtact

SEQ ID NO: 135 - RNA, 20 nt, synthetic construct
  misc_feature 1..20: note = synthesized
  source 1..20: mol_type = other RNA
gctctggacctggaagtgct

SEQ ID NO: 136 - RNA, 20 nt, synthetic construct
  misc_feature 1..20: note = synthesized
  source 1..20: mol_type = other RNA
gtactggaagctggaactct

SEQ ID NO: 137 - RNA, 20 nt, synthetic construct
  misc_feature 1..20: note = synthesized
  source 1..20: mol_type = other RNA
gtgctggaagctggaactct

SEQ ID NO: 138 - RNA, 20 nt, synthetic construct
  misc_feature 1..20: note = synthesized
  source 1..20: mol_type = other RNA
tactggaagctggaactctg

SEQ ID NO: 139 - RNA, 20 nt, synthetic construct
  misc_feature 1..20: note = synthesized
  source 1..20: mol_type = other RNA
tgctggaagctggaactctg

SEQ ID NO: 140 - RNA, 20 nt, synthetic construct
  misc_feature 1..20: note = synthesized
  source 1..20: mol_type = other RNA
ttccagcttccagcacttcc

SEQ ID NO: 141 - RNA, 20 nt, synthetic construct
  misc_feature 1..20: note = synthesized
  source 1..20: mol_type = other RNA
ttccagcttccagtacttcc

SEQ ID NO: 142 - RNA, 20 nt, synthetic construct
  misc_feature 1..20: note = synthesized
  source 1..20: mol_type = other RNA
agtccttgtgccttggcctc

SEQ ID NO: 143 - RNA, 20 nt, synthetic construct
  misc_feature 1..20: note = synthesized
  source 1..20: mol_type = other RNA
agtccttgtgtcttggcctc

SEQ ID NO: 144 - RNA, 20 nt, synthetic construct
  misc_feature 1..20: note = synthesized
  source 1..20: mol_type = other RNA
atttgtgccagtccttgtgc

SEQ ID NO: 145 - RNA, 20 nt, synthetic construct
  misc_feature 1..20: note = synthesized
  source 1..20: mol_type = other RNA
atttgtgccagtccttgtgt

SEQ ID NO: 146 - RNA, 20 nt, synthetic construct
  misc_feature 1..20: note = synthesized
  source 1..20: mol_type = other RNA
cctgaggccaagacacaagg

SEQ ID NO: 147 - RNA, 20 nt, synthetic construct
  misc_feature 1..20: note = synthesized
  source 1..20: mol_type = other RNA
cctgaggccaaggcacaagg

SEQ ID NO: 148 - RNA, 20 nt, synthetic construct
  misc_feature 1..20: note = synthesized
  source 1..20: mol_type = other RNA
cttcctgaggccaagacaca

SEQ ID NO: 149 - RNA, 20 nt, synthetic construct
  misc_feature 1..20: note = synthesized
  source 1..20: mol_type = other RNA
cttcctgaggccaaggcaca

SEQ ID NO: 150 - RNA, 20 nt, synthetic construct
  misc_feature 1..20: note = synthesized
  source 1..20: mol_type = other RNA
gccttggcctcaggaagctt

SEQ ID NO: 151 - RNA, 20 nt, synthetic construct
  misc_feature 1..20: note = synthesized
  source 1..20: mol_type = other RNA
gtccttgtgccttggcctca

SEQ ID NO: 152 - RNA, 20 nt, synthetic construct
  misc_feature 1..20: note = synthesized
  source 1..20: mol_type = other RNA
gtccttgtgtcttggcctca

SEQ ID NO: 153 - RNA, 20 nt, synthetic construct
  misc_feature 1..20: note = synthesized
  source 1..20: mol_type = other RNA
gtcttggcctcaggaagctt

SEQ ID NO: 154 - RNA, 20 nt, synthetic construct
  misc_feature 1..20: note = synthesized
  source 1..20: mol_type = other RNA
tgaggccaagacacaaggac

SEQ ID NO: 155 - RNA, 20 nt, synthetic construct
  misc_feature 1..20: note = synthesized
  source 1..20: mol_type = other RNA
tgaggccaaggcacaaggac

SEQ ID NO: 156 - RNA, 20 nt, synthetic construct
  misc_feature 1..20: note = synthesized
  source 1..20: mol_type = other RNA
ttcctgaggccaagacacaa

SEQ ID NO: 157 - RNA, 20 nt, synthetic construct
  misc_feature 1..20: note = synthesized
  source 1..20: mol_type = other RNA
ttcctgaggccaaggcacaa

SEQ ID NO: 158 - RNA, 20 nt, synthetic construct
  misc_feature 1..20: note = synthesized
  source 1..20: mol_type = other RNA
ttgtgccagtccttgtgcct

SEQ ID NO: 159 - RNA, 20 nt, synthetic construct
  misc_feature 1..20: note = synthesized
  source 1..20: mol_type = other RNA
ttgtgccagtccttgtgtct

SEQ ID NO: 160 - RNA, 20 nt, synthetic construct
  misc_feature 1..20: note = synthesized
  source 1..20: mol_type = other RNA
ctacataacaaataaagaaa

SEQ ID NO: 161 - RNA, 20 nt, synthetic construct
  misc_feature 1..20: note = synthesized
  source 1..20: mol_type = other RNA
ctacatagcaaataaagaaa

SEQ ID NO: 162 - RNA, 20 nt, synthetic construct
  misc_feature 1..20: note = synthesized
  source 1..20: mol_type = other RNA
cttttctttatttgctatgt

SEQ ID NO: 163 - RNA, 20 nt, synthetic construct
  misc_feature 1..20: note = synthesized
  source 1..20: mol_type = other RNA
cttttctttatttgttatgt

SEQ ID NO: 164 - RNA, 20 nt, synthetic construct
  misc_feature 1..20: note = synthesized
  source 1..20: mol_type = other RNA
gttacctacataacaaataa

SEQ ID NO: 165 - RNA, 20 nt, synthetic construct
  misc_feature 1..20: note = synthesized
  source 1..20: mol_type = other RNA
gttacctacatagcaaataa

SEQ ID NO: 166 - RNA, 20 nt, synthetic construct
  misc_feature 1..20: note = synthesized
  source 1..20: mol_type = other RNA
tacatagcaaataaagaaaa

SEQ ID NO: 167 - RNA, 20 nt, synthetic construct
  misc_feature 1..20: note = synthesized
  source 1..20: mol_type = other RNA
tccttttctttatttgctat

SEQ ID NO: 168 - RNA, 20 nt, synthetic construct
  misc_feature 1..20: note = synthesized
  source 1..20: mol_type = other RNA
tccttttctttatttgttat

SEQ ID NO: 169 - RNA, 20 nt, synthetic construct
  misc_feature 1..20: note = synthesized
  source 1..20: mol_type = other RNA
acttctcttcccataccacc

SEQ ID NO: 170 - RNA, 20 nt, synthetic construct
  misc_feature 1..20: note = synthesized
  source 1..20: mol_type = other RNA
acttctcttcctataccacc

SEQ ID NO: 171 - RNA, 20 nt, synthetic construct
  misc_feature 1..20: note = synthesized
  source 1..20: mol_type = other RNA
ataggaagagaagttctcaa

SEQ ID NO: 172 - RNA, 20 nt, synthetic construct
  misc_feature 1..20: note = synthesized
  source 1..20: mol_type = other RNA
atgggaagagaagttctcaa

SEQ ID NO: 173 - RNA, 20 nt, synthetic construct
  misc_feature 1..20: note = synthesized
  source 1..20: mol_type = other RNA
attttgggtggtataggaag

SEQ ID NO: 174 - RNA, 20 nt, synthetic construct
  misc_feature 1..20: note = synthesized
  source 1..20: mol_type = other RNA
attttgggtggtatgggaag

SEQ ID NO: 175 - RNA, 20 nt, synthetic construct
  misc_feature 1..20: note = synthesized
  source 1..20: mol_type = other RNA
tctcttcccataccacccaa

SEQ ID NO: 176 - RNA, 20 nt, synthetic construct
  misc_feature 1..20: note = synthesized
  source 1..20: mol_type = other RNA
tctcttcctataccacccaa

SEQ ID NO: 177 - RNA, 20 nt, synthetic construct
  misc_feature 1..20: note = synthesized
  source 1..20: mol_type = other RNA
tgattttgggtggtatagga

SEQ ID NO: 178 - RNA, 20 nt, synthetic construct
  misc_feature 1..20: note = synthesized
  source 1..20: mol_type = other RNA
tgattttgggtggtatggga

SEQ ID NO: 179 - RNA, 20 nt, synthetic construct
  misc_feature 1..20: note = synthesized
  source 1..20: mol_type = other RNA
tggtataggaagagaagttc

SEQ ID NO: 180 - RNA, 20 nt, synthetic construct
  misc_feature 1..20: note = synthesized
  source 1..20: mol_type = other RNA
tggtatgggaagagaagttc

SEQ ID NO: 181 - RNA, 20 nt, synthetic construct
  misc_feature 1..20: note = synthesized
  source 1..20: mol_type = other RNA
ttatgattttgggtggtata

SEQ ID NO: 182 - RNA, 20 nt, synthetic construct
  misc_feature 1..20: note = synthesized
  source 1..20: mol_type = other RNA
ttatgattttgggtggtatg

SEQ ID NO: 183 - RNA, 20 nt, synthetic construct
  misc_feature 1..20: note = synthesized
  source 1..20: mol_type = other RNA
tttgagaacttctcttccca

SEQ ID NO: 184 - RNA, 20 nt, synthetic construct
  misc_feature 1..20: note = synthesized
  source 1..20: mol_type = other RNA
tttgagaacttctcttccta

SEQ ID NO: 185 - RNA, 20 nt, synthetic construct
  misc_feature 1..20: note = synthesized
  source 1..20: mol_type = other RNA
aaaagaaaaagccaatgcac

SEQ ID NO: 186 - RNA, 20 nt, synthetic construct
  misc_feature 1..20: note = synthesized
  source 1..20: mol_type = other RNA
aaaagaaaaagccaatgcat

SEQ ID NO: 187 - RNA, 20 nt, synthetic construct
  misc_feature 1..20: note = synthesized
  source 1..20: mol_type = other RNA
aatgcacggcagattataat

SEQ ID NO: 188 - RNA, 20 nt, synthetic construct
  misc_feature 1..20: note = synthesized
  source 1..20: mol_type = other RNA
aatgcatggcagattataat

SEQ ID NO: 189 - RNA, 20 nt, synthetic construct
  misc_feature 1..20: note = synthesized
  source 1..20: mol_type = other RNA
aattataatctgccatgcat

SEQ ID NO: 190 - RNA, 20 nt, synthetic construct
  misc_feature 1..20: note = synthesized
  source 1..20: mol_type = other RNA
aattataatctgccgtgcat

SEQ ID NO: 191 - RNA, 20 nt, synthetic construct
  misc_feature 1..20: note = synthesized
  source 1..20: mol_type = other RNA
agaaaaagccaatgcacggc

SEQ ID NO: 192 - RNA, 20 nt, synthetic construct
  misc_feature 1..20: note = synthesized
  source 1..20: mol_type = other RNA
agaaaaagccaatgcatggc

SEQ ID NO: 193 - RNA, 20 nt, synthetic construct
  misc_feature 1..20: note = synthesized
  source 1..20: mol_type = other RNA
atgcattggctttttctttt

SEQ ID NO: 194 - RNA, 20 nt, synthetic construct
  misc_feature 1..20: note = synthesized
  source 1..20: mol_type = other RNA
gtgcattggctttttctttt

SEQ ID NO: 195 - RNA, 20 nt, synthetic construct
  misc_feature 1..20: note = synthesized
  source 1..20: mol_type = other RNA
aattaggtgccaggaaattg

SEQ ID NO: 196 - RNA, 20 nt, synthetic construct
  misc_feature 1..20: note = synthesized
  source 1..20: mol_type = other RNA
atttcctggcacctaatcta

SEQ ID NO: 197 - RNA, 20 nt, synthetic construct
  misc_feature 1..20: note = synthesized
  source 1..20: mol_type = other RNA
atttcctggcacctaattta

SEQ ID NO: 198 - RNA, 20 nt, synthetic construct
  misc_feature 1..20: note = synthesized
  source 1..20: mol_type = other RNA
cacctaatctatggctaagt

SEQ ID NO: 199 - RNA, 20 nt, synthetic construct
  misc_feature 1..20: note = synthesized
  source 1..20: mol_type = other RNA
cacctaatttatggctaagt

SEQ ID NO: 200 - RNA, 20 nt, synthetic construct
  misc_feature 1..20: note = synthesized
  source 1..20: mol_type = other RNA
gattaggtgccaggaaattg

SEQ ID NO: 201 - RNA, 20 nt, synthetic construct
  misc_feature 1..20: note = synthesized
  source 1..20: mol_type = other RNA
gcacctaatctatggctaag

SEQ ID NO: 202 - RNA, 20 nt, synthetic construct
  misc_feature 1..20: note = synthesized
  source 1..20: mol_type = other RNA
gcacctaatttatggctaag

SEQ ID NO: 203 - RNA, 20 nt, synthetic construct
  misc_feature 1..20: note = synthesized
  source 1..20: mol_type = other RNA
ggcacctaatctatggctaa

SEQ ID NO: 204 - RNA, 20 nt, synthetic construct
  misc_feature 1..20: note = synthesized
  source 1..20: mol_type = other RNA
ggcacctaatttatggctaa

SEQ ID NO: 205 - RNA, 20 nt, synthetic construct
  misc_feature 1..20: note = synthesized
  source 1..20: mol_type = other RNA
ggtccacttagccataaatt

SEQ ID NO: 206 - RNA, 20 nt, synthetic construct
  misc_feature 1..20: note = synthesized
  source 1..20: mol_type = other RNA
ggtccacttagccatagatt

SEQ ID NO: 207 - RNA, 20 nt, synthetic construct
  misc_feature 1..20: note = synthesized
  source 1..20: mol_type = other RNA
gtccacttagccataaatta

SEQ ID NO: 208 - RNA, 20 nt, synthetic construct
  misc_feature 1..20: note = synthesized
  source 1..20: mol_type = other RNA
gtccacttagccatagatta

SEQ ID NO: 209 - RNA, 20 nt, synthetic construct
  misc_feature 1..20: note = synthesized
  source 1..20: mol_type = other RNA
taaattaggtgccaggaaat

SEQ ID NO: 210 - RNA, 20 nt, synthetic construct
  misc_feature 1..20: note = synthesized
  source 1..20: mol_type = other RNA
tagattaggtgccaggaaat

SEQ ID NO: 211 - RNA, 20 nt, synthetic construct
  misc_feature 1..20: note = synthesized
  source 1..20: mol_type = other RNA
tagccataaattaggtgcca

SEQ ID NO: 212 - RNA, 20 nt, synthetic construct
  misc_feature 1..20: note = synthesized
  source 1..20: mol_type = other RNA
tagccatagattaggtgcca

SEQ ID NO: 213 - RNA, 20 nt, synthetic construct
  misc_feature 1..20: note = synthesized
  source 1..20: mol_type = other RNA
tggcacctaatctatggcta

SEQ ID NO: 214 - RNA, 20 nt, synthetic construct
  misc_feature 1..20: note = synthesized
  source 1..20: mol_type = other RNA
tggcacctaatttatggcta

SEQ ID NO: 215 - RNA, 20 nt, synthetic construct
  misc_feature 1..20: note = synthesized
  source 1..20: mol_type = other RNA
ttagccataaattaggtgcc

SEQ ID NO: 216 - RNA, 20 nt, synthetic construct
  misc_feature 1..20: note = synthesized
  source 1..20: mol_type = other RNA
ttagccatagattaggtgcc

SEQ ID NO: 217 - RNA, 20 nt, synthetic construct
  misc_feature 1..20: note = synthesized
  source 1..20: mol_type = other RNA
aaaacaaggacatctgggac

SEQ ID NO: 218 - RNA, 20 nt, synthetic construct
  misc_feature 1..20: note = synthesized
  source 1..20: mol_type = other RNA
actcaaaaacaaggacatct

SEQ ID NO: 219 - RNA, 20 nt, synthetic construct
  misc_feature 1..20: note = synthesized
  source 1..20: mol_type = other RNA
actcagaaacaaggacatct

SEQ ID NO: 220 - RNA, 20 nt, synthetic construct
  misc_feature 1..20: note = synthesized
  source 1..20: mol_type = other RNA
agatgtccttgtttctgagt

SEQ ID NO: 221 - RNA, 20 nt, synthetic construct
  misc_feature 1..20: note = synthesized
  source 1..20: mol_type = other RNA
agatgtccttgtttttgagt

SEQ ID NO: 222 - RNA, 20 nt, synthetic construct
  misc_feature 1..20: note = synthesized
  source 1..20: mol_type = other RNA
atgtccttgtttctgagtag

SEQ ID NO: 223 - RNA, 20 nt, synthetic construct
  misc_feature 1..20: note = synthesized
  source 1..20: mol_type = other RNA
atgtccttgtttttgagtag

SEQ ID NO: 224 - RNA, 20 nt, synthetic construct
  misc_feature 1..20: note = synthesized
  source 1..20: mol_type = other RNA
ctcaaaaacaaggacatctg

SEQ ID NO: 225 - RNA, 20 nt, synthetic construct
  misc_feature 1..20: note = synthesized
  source 1..20: mol_type = other RNA
ctcagaaacaaggacatctg

SEQ ID NO: 226 - RNA, 20 nt, synthetic construct
  misc_feature 1..20: note = synthesized
  source 1..20: mol_type = other RNA
ctgagtagagggaaaaggaa

SEQ ID NO: 227 - RNA, 20 nt, synthetic construct
  misc_feature 1..20: note = synthesized
  source 1..20: mol_type = other RNA
gaaacaaggacatctgggac

SEQ ID NO: 228 - RNA, 20 nt, synthetic construct
  misc_feature 1..20: note = synthesized
  source 1..20: mol_type = other RNA
gtcccagatgtccttgtttc

SEQ ID NO: 229 - RNA, 20 nt, synthetic construct
  misc_feature 1..20: note = synthesized
  source 1..20: mol_type = other RNA
gtcccagatgtccttgtttt

SEQ ID NO: 230 - RNA, 20 nt, synthetic construct
  misc_feature 1..20: note = synthesized
  source 1..20: mol_type = other RNA
gtccttgtttctgagtagag

SEQ ID NO: 231 - RNA, 20 nt, synthetic construct
  misc_feature 1..20: note = synthesized
  source 1..20: mol_type = other RNA
gtccttgtttttgagtagag

SEQ ID NO: 232 - RNA, 20 nt, synthetic construct
  misc_feature 1..20: note = synthesized
  source 1..20: mol_type = other RNA
gtttctgagtagagggaaaa

SEQ ID NO: 233 - RNA, 20 nt, synthetic construct
  misc_feature 1..20: note = synthesized
  source 1..20: mol_type = other RNA
gtttttgagtagagggaaaa

SEQ ID NO: 234 - RNA, 20 nt, synthetic construct
  misc_feature 1..20: note = synthesized
  source 1..20: mol_type = other RNA
tactcaaaaacaaggacatc

SEQ ID NO: 235 - RNA, 20 nt, synthetic construct
  misc_feature 1..20: note = synthesized
  source 1..20: mol_type = other RNA
tactcagaaacaaggacatc

SEQ ID NO: 236 - RNA, 20 nt, synthetic construct
  misc_feature 1..20: note = synthesized
  source 1..20: mol_type = other RNA
tcaaaaacaaggacatctgg

SEQ ID NO: 237 - RNA, 20 nt, synthetic construct
  misc_feature 1..20: note = synthesized
  source 1..20: mol_type = other RNA
tcagaaacaaggacatctgg

SEQ ID NO: 238 - RNA, 20 nt, synthetic construct
  misc_feature 1..20: note = synthesized
  source 1..20: mol_type = other RNA
tctgagtagagggaaaagga

SEQ ID NO: 239 - RNA, 20 nt, synthetic construct
  misc_feature 1..20: note = synthesized
  source 1..20: mol_type = other RNA
tgtccttgtttctgagtaga

SEQ ID NO: 240 - RNA, 20 nt, synthetic construct
  misc_feature 1..20: note = synthesized
  source 1..20: mol_type = other RNA
tgtccttgtttttgagtaga

SEQ ID NO: 241 - RNA, 20 nt, synthetic construct
  misc_feature 1..20: note = synthesized
  source 1..20: mol_type = other RNA
tgtttctgagtagagggaaa

SEQ ID NO: 242 - RNA, 20 nt, synthetic construct
  misc_feature 1..20: note = synthesized
  source 1..20: mol_type = other RNA
tgtttttgagtagagggaaa

SEQ ID NO: 243 - RNA, 20 nt, synthetic construct
  misc_feature 1..20: note = synthesized
  source 1..20: mol_type = other RNA
ttccctctactcaaaaacaa

SEQ ID NO: 244 - RNA, 20 nt, synthetic construct
  misc_feature 1..20: note = synthesized
  source 1..20: mol_type = other RNA
ttccctctactcagaaacaa

SEQ ID NO: 245 - RNA, 20 nt, synthetic construct
  misc_feature 1..20: note = synthesized
  source 1..20: mol_type = other RNA
ttgagtagagggaaaaggaa

SEQ ID NO: 246 - RNA, 20 nt, synthetic construct
  misc_feature 1..20: note = synthesized
  source 1..20: mol_type = other RNA
tttccctctactcaaaaaca

SEQ ID NO: 247 - RNA, 20 nt, synthetic construct
  misc_feature 1..20: note = synthesized
  source 1..20: mol_type = other RNA
tttccctctactcagaaaca

SEQ ID NO: 248 - RNA, 20 nt, synthetic construct
  misc_feature 1..20: note = synthesized
  source 1..20: mol_type = other RNA
tttctgagtagagggaaaag

SEQ ID NO: 249 - RNA, 20 nt, synthetic construct
  misc_feature 1..20: note = synthesized
  source 1..20: mol_type = other RNA
tttgagtagagggaaaagga

SEQ ID NO: 250 - RNA, 20 nt, synthetic construct
  misc_feature 1..20: note = synthesized
  source 1..20: mol_type = other RNA
ttttccctctactcaaaaac

SEQ ID NO: 251 - RNA, 20 nt, synthetic construct
  misc_feature 1..20: note = synthesized
  source 1..20: mol_type = other RNA
ttttccctctactcagaaac

SEQ ID NO: 252 - RNA, 20 nt, synthetic construct
  misc_feature 1..20: note = synthesized
  source 1..20: mol_type = other RNA
acgcagtaccttataactcc

SEQ ID NO: 253 - RNA, 20 nt, synthetic construct
  misc_feature 1..20: note = synthesized
  source 1..20: mol_type = other RNA
actgcatggaaaaaccaagc

SEQ ID NO: 254 - RNA, 20 nt, synthetic construct
  misc_feature 1..20: note = synthesized
  source 1..20: mol_type = other RNA
actgcgtggaaaaaccaagc

SEQ ID NO: 255 - RNA, 20 nt, synthetic construct
  misc_feature 1..20: note = synthesized
  source 1..20: mol_type = other RNA
aggagttataaggtactgca

SEQ ID NO: 256 - RNA, 20 nt, synthetic construct
  misc_feature 1..20: note = synthesized
  source 1..20: mol_type = other RNA
aggagttataaggtactgcg

SEQ ID NO: 257 - RNA, 20 nt, synthetic construct
  misc_feature 1..20: note = synthesized
  source 1..20: mol_type = other RNA
agttataaggtactgcatgg

SEQ ID NO: 258 - RNA, 20 nt, synthetic construct
  misc_feature 1..20: note = synthesized
  source 1..20: mol_type = other RNA
agttataaggtactgcgtgg

SEQ ID NO: 259 - RNA, 20 nt, synthetic construct
  misc_feature 1..20: note = synthesized
  source 1..20: mol_type = other RNA
atgcagtaccttataactcc

SEQ ID NO: 260 - RNA, 20 nt, synthetic construct
  misc_feature 1..20: note = synthesized
  source 1..20: mol_type = other RNA
cacgcagtaccttataactc

SEQ ID NO: 261 - RNA, 20 nt, synthetic construct
  misc_feature 1..20: note = synthesized
  source 1..20: mol_type = other RNA
catgcagtaccttataactc

SEQ ID NO: 262 - RNA, 20 nt, synthetic construct
  misc_feature 1..20: note = synthesized
  source 1..20: mol_type = other RNA
cgcagtaccttataactcct

SEQ ID NO: 263 - RNA, 20 nt, synthetic construct
  misc_feature 1..20: note = synthesized
  source 1..20: mol_type = other RNA
ggagttataaggtactgcat

SEQ ID NO: 264 - RNA, 20 nt, synthetic construct
  misc_feature 1..20: note = synthesized
  source 1..20: mol_type = other RNA
ggagttataaggtactgcgt

SEQ ID NO: 265 - RNA, 20 nt, synthetic construct
  misc_feature 1..20: note = synthesized
  source 1..20: mol_type = other RNA
taaggtactgcatggaaaaa

SEQ ID NO: 266 - RNA, 20 nt, synthetic construct
  misc_feature 1..20: note = synthesized
  source 1..20: mol_type = other RNA
taaggtactgcgtggaaaaa

SEQ ID NO: 267 - RNA, 20 nt, synthetic construct
  misc_feature 1..20: note = synthesized
  source 1..20: mol_type = other RNA
tactgcatggaaaaaccaag

SEQ ID NO: 268 - RNA, 20 nt, synthetic construct
  misc_feature 1..20: note = synthesized
  source 1..20: mol_type = other RNA
tactgcgtggaaaaaccaag

SEQ ID NO: 269 - RNA, 20 nt, synthetic construct
  misc_feature 1..20: note = synthesized
  source 1..20: mol_type = other RNA
tgcagtaccttataactcct

SEQ ID NO: 270 - RNA, 20 nt, synthetic construct
  misc_feature 1..20: note = synthesized
  source 1..20: mol_type = other RNA
acaagaggcctaattttcat

SEQ ID NO: 271 - RNA, 20 nt, synthetic construct
  misc_feature 1..20: note = synthesized
  source 1..20: mol_type = other RNA
acaaggggcctaattttcat

SEQ ID NO: 272 - RNA, 20 nt, synthetic construct
  misc_feature 1..20: note = synthesized
  source 1..20: mol_type = other RNA
agaggcctaattttcatgcg

SEQ ID NO: 273 - RNA, 20 nt, synthetic construct
  misc_feature 1..20: note = synthesized
  source 1..20: mol_type = other RNA
aggggcctaattttcatgcg

SEQ ID NO: 274 - RNA, 20 nt, synthetic construct
  misc_feature 1..20: note = synthesized
  source 1..20: mol_type = other RNA
caagaggcctaattttcatg

SEQ ID NO: 275 - RNA, 20 nt, synthetic construct
  misc_feature 1..20: note = synthesized
  source 1..20: mol_type = other RNA
caaggggcctaattttcatg

SEQ ID NO: 276 - RNA, 20 nt, synthetic construct
  misc_feature 1..20: note = synthesized
  source 1..20: mol_type = other RNA
cacaagaggcctaattttca

SEQ ID NO: 277 - RNA, 20 nt, synthetic construct
  misc_feature 1..20: note = synthesized
  source 1..20: mol_type = other RNA
cacaaggggcctaattttca

SEQ ID NO: 278 - RNA, 20 nt, synthetic construct
  misc_feature 1..20: note = synthesized
  source 1..20: mol_type = other RNA
catgaaaattaggccccttg

SEQ ID NO: 279 - RNA, 20 nt, synthetic construct
  misc_feature 1..20: note = synthesized
  source 1..20: mol_type = other RNA
catgaaaattaggcctcttg

SEQ ID NO: 280 - RNA, 20 nt, synthetic construct
  misc_feature 1..20: note = synthesized
  source 1..20: mol_type = other RNA
ccccttgtgacccaataggc

SEQ ID NO: 281 - RNA, 20 nt, synthetic construct
  misc_feature 1..20: note = synthesized
  source 1..20: mol_type = other RNA
cctcttgtgacccaataggc

SEQ ID NO: 282 - RNA, 20 nt, synthetic construct
  misc_feature 1..20: note = synthesized
  source 1..20: mol_type = other RNA
cgcatgaaaattaggcccct

SEQ ID NO: 283 - RNA, 20 nt, synthetic construct
  misc_feature 1..20: note = synthesized
  source 1..20: mol_type = other RNA
cgcatgaaaattaggcctct

SEQ ID NO: 284 - RNA, 20 nt, synthetic construct
  misc_feature 1..20: note = synthesized
  source 1..20: mol_type = other RNA
gaaaattaggccccttgtga

SEQ ID NO: 285 - RNA, 20 nt, synthetic construct
  misc_feature 1..20: note = synthesized
  source 1..20: mol_type = other RNA
gaaaattaggcctcttgtga

SEQ ID NO: 286 - RNA, 20 nt, synthetic construct
  misc_feature 1..20: note = synthesized
  source 1..20: mol_type = other RNA
taggccccttgtgacccaat

SEQ ID NO: 287 - RNA, 20 nt, synthetic construct
  misc_feature 1..20: note = synthesized
  source 1..20: mol_type = other RNA
taggcctcttgtgacccaat

SEQ ID NO: 288 - RNA, 20 nt, synthetic construct
  misc_feature 1..20: note = synthesized
  source 1..20: mol_type = other RNA
agaggtcgcagagaaactct

SEQ ID NO: 289 - RNA, 20 nt, synthetic construct
  misc_feature 1..20: note = synthesized
  source 1..20: mol_type = other RNA
agaggttgcagagaaactct

SEQ ID NO: 290 - RNA, 20 nt, synthetic construct
  misc_feature 1..20: note = synthesized
  source 1..20: mol_type = other RNA
cgcagagaaactctggaatg

SEQ ID NO: 291 - RNA, 20 nt, synthetic construct
  misc_feature 1..20: note = synthesized
  source 1..20: mol_type = other RNA
gaggactagttagaggtcgc

SEQ ID NO: 292 - RNA, 20 nt, synthetic construct
  misc_feature 1..20: note = synthesized
  source 1..20: mol_type = other RNA
gaggactagttagaggttgc

SEQ ID NO: 293 - RNA, 20 nt, synthetic construct
  misc_feature 1..20: note = synthesized
  source 1..20: mol_type = other RNA
gagtttctctgcaacctcta

SEQ ID NO: 294 - RNA, 20 nt, synthetic construct
  misc_feature 1..20: note = synthesized
  source 1..20: mol_type = other RNA
gagtttctctgcgacctcta

SEQ ID NO: 295 - RNA, 20 nt, synthetic construct
  misc_feature 1..20: note = synthesized
  source 1..20: mol_type = other RNA
ggactagttagaggtcgcag

SEQ ID NO: 296 - RNA, 20 nt, synthetic construct
  misc_feature 1..20: note = synthesized
  source 1..20: mol_type = other RNA
ggactagttagaggttgcag

SEQ ID NO: 297 - RNA, 20 nt, synthetic construct
  misc_feature 1..20: note = synthesized
  source 1..20: mol_type = other RNA
gtcgcagagaaactctggaa

SEQ ID NO: 298 - RNA, 20 nt, synthetic construct
  misc_feature 1..20: note = synthesized
  source 1..20: mol_type = other RNA
gttgcagagaaactctggaa

SEQ ID NO: 299 - RNA, 20 nt, synthetic construct
  misc_feature 1..20: note = synthesized
  source 1..20: mol_type = other RNA
tagaggtcgcagagaaactc

SEQ ID NO: 300 - RNA, 20 nt, synthetic construct
  misc_feature 1..20: note = synthesized
  source 1..20: mol_type = other RNA
tagaggttgcagagaaactc

SEQ ID NO: 301 - RNA, 20 nt, synthetic construct
  misc_feature 1..20: note = synthesized
  source 1..20: mol_type = other RNA
tcgcagagaaactctggaat

SEQ ID NO: 302 - RNA, 20 nt, synthetic construct
  misc_feature 1..20: note = synthesized
  source 1..20: mol_type = other RNA
tgcagagaaactctggaatg

SEQ ID NO: 303 - RNA, 20 nt, synthetic construct
  misc_feature 1..20: note = synthesized
  source 1..20: mol_type = other RNA
ttgcagagaaactctggaat

SEQ ID NO: 304 - RNA, 20 nt, synthetic construct
  misc_feature 1..20: note = synthesized
  source 1..20: mol_type = other RNA
ccaggcaacttcacatctct

SEQ ID NO: 305 - RNA, 20 nt, synthetic construct
  misc_feature 1..20: note = synthesized
  source 1..20: mol_type = other RNA
ccaggcaacttcgcatctct

SEQ ID NO: 306 - RNA, 20 nt, synthetic construct
  misc_feature 1..20: note = synthesized
  source 1..20: mol_type = other RNA
gccaggcaacttcacatctc

SEQ ID NO: 307 - RNA, 20 nt, synthetic construct
  misc_feature 1..20: note = synthesized
  source 1..20: mol_type = other RNA
gccaggcaacttcgcatctc

SEQ ID NO: 308 - RNA, 20 nt, synthetic construct
  misc_feature 1..20: note = synthesized
  source 1..20: mol_type = other RNA
tccagagatgcgaagttgcc

SEQ ID NO: 309 - RNA, 20 nt, synthetic construct
  misc_feature 1..20: note = synthesized
  source 1..20: mol_type = other RNA
tccagagatgtgaagttgcc

SEQ ID NO: 310 - RNA, 20 nt, synthetic construct
  misc_feature 1..20: note = synthesized
  source 1..20: mol_type = other RNA
actgcattatccctcaaaga

SEQ ID NO: 311 - RNA, 20 nt, synthetic construct
  misc_feature 1..20: note = synthesized
  source 1..20: mol_type = other RNA
actgcattatctctcaaaga

SEQ ID NO: 312 - RNA, 20 nt, synthetic construct
  misc_feature 1..20: note = synthesized
  source 1..20: mol_type = other RNA
agagataatgcagttatatc

SEQ ID NO: 313 - RNA, 20 nt, synthetic construct
  misc_feature 1..20: note = synthesized
  source 1..20: mol_type = other RNA
agggataatgcagttatatc

SEQ ID NO: 314 - RNA, 20 nt, synthetic construct
  misc_feature 1..20: note = synthesized
  source 1..20: mol_type = other RNA
ataactgcattatccctcaa

SEQ ID NO: 315 - RNA, 20 nt, synthetic construct
  misc_feature 1..20: note = synthesized
  source 1..20: mol_type = other RNA
ataactgcattatctctcaa

SEQ ID NO: 316 - RNA, 20 nt, synthetic construct
  misc_feature 1..20: note = synthesized
  source 1..20: mol_type = other RNA
attatccctcaaagaaggaa

SEQ ID NO: 317 - RNA, 20 nt, synthetic construct
  misc_feature 1..20: note = synthesized
  source 1..20: mol_type = other RNA
attatctctcaaagaaggaa

SEQ ID NO: 318 - RNA, 20 nt, synthetic construct
  misc_feature 1..20: note = synthesized
  source 1..20: mol_type = other RNA
cattatccctcaaagaagga

SEQ ID NO: 319 - RNA, 20 nt, synthetic construct
  misc_feature 1..20: note = synthesized
  source 1..20: mol_type = other RNA
cattatctctcaaagaagga

SEQ ID NO: 320 - RNA, 20 nt, synthetic construct
  misc_feature 1..20: note = synthesized
  source 1..20: mol_type = other RNA
cctcaaagaaggaaggagag

SEQ ID NO: 321 - RNA, 20 nt, synthetic construct
  misc_feature 1..20: note = synthesized
  source 1..20: mol_type = other RNA
ctgcattatccctcaaagaa

SEQ ID NO: 322 - RNA, 20 nt, synthetic construct
  misc_feature 1..20: note = synthesized
  source 1..20: mol_type = other RNA
ctgcattatctctcaaagaa

SEQ ID NO: 323 - RNA, 20 nt, synthetic construct
  misc_feature 1..20: note = synthesized
  source 1..20: mol_type = other RNA
gagagataatgcagttatat

SEQ ID NO: 324 - RNA, 20 nt, synthetic construct
  misc_feature 1..20: note = synthesized
  source 1..20: mol_type = other RNA
gagggataatgcagttatat

SEQ ID NO: 325 - RNA, 20 nt, synthetic construct
  misc_feature 1..20: note = synthesized
  source 1..20: mol_type = other RNA
tatccctcaaagaaggaagg

SEQ ID NO: 326 - RNA, 20 nt, synthetic construct
  misc_feature 1..20: note = synthesized
  source 1..20: mol_type = other RNA
tatctctcaaagaaggaagg

SEQ ID NO: 327 - RNA, 20 nt, synthetic construct
  misc_feature 1..20: note = synthesized
  source 1..20: mol_type = other RNA
tccctcaaagaaggaaggag

SEQ ID NO: 328 - RNA, 20 nt, synthetic construct
  misc_feature 1..20: note = synthesized
  source 1..20: mol_type = other RNA
tctcaaagaaggaaggagag

SEQ ID NO: 329 - RNA, 20 nt, synthetic construct
  misc_feature 1..20: note = synthesized
  source 1..20: mol_type = other RNA
tctctcaaagaaggaaggag

SEQ ID NO: 330 - RNA, 20 nt, synthetic construct
  misc_feature 1..20: note = synthesized
  source 1..20: mol_type = other RNA
acaggacttcagttgcatgc

SEQ ID NO: 331 - RNA, 20 nt, synthetic construct
  misc_feature 1..20: note = synthesized
  source 1..20: mol_type = other RNA
acaggatttcagttgcatgc

SEQ ID NO: 332 - RNA, 20 nt, synthetic construct
  misc_feature 1..20: note = synthesized
  source 1..20: mol_type = other RNA
acttcagttgcatgctcagg

SEQ ID NO: 333 - RNA, 20 nt, synthetic construct
  misc_feature 1..20: note = synthesized
  source 1..20: mol_type = other RNA
aggacttcagttgcatgctc

SEQ ID NO: 334 - RNA, 20 nt, synthetic construct
  misc_feature 1..20: note = synthesized
  source 1..20: mol_type = other RNA
aggatttcagttgcatgctc

SEQ ID NO: 335 - RNA, 20 nt, synthetic construct
  misc_feature 1..20: note = synthesized
  source 1..20: mol_type = other RNA
atcctgtctgttcacccact

SEQ ID NO: 336 - RNA, 20 nt, synthetic construct
  misc_feature 1..20: note = synthesized
  source 1..20: mol_type = other RNA
atgcaactgaaatcctgtct

SEQ ID NO: 337 - RNA, 20 nt, synthetic construct
  misc_feature 1..20: note = synthesized
  source 1..20: mol_type = other RNA
atgcaactgaagtcctgtct

SEQ ID NO: 338 - RNA, 20 nt, synthetic construct
  misc_feature 1..20: note = synthesized
  source 1..20: mol_type = other RNA
atttcagttgcatgctcagg

SEQ ID NO: 339 - RNA, 20 nt, synthetic construct
  misc_feature 1..20: note = synthesized
  source 1..20: mol_type = other RNA
gtcctgtctgttcacccact

SEQ ID NO: 340 - RNA, 20 nt, synthetic construct
  misc_feature 1..20: note = synthesized
  source 1..20: mol_type = other RNA
caggtcagcctgtgagcccc

SEQ ID NO: 341 - RNA, 20 nt, synthetic construct
  misc_feature 1..20: note = synthesized
  source 1..20: mol_type = other RNA
caggtcagcctgtgagtccc

SEQ ID NO: 342 - RNA, 20 nt, synthetic construct
  misc_feature 1..20: note = synthesized
  source 1..20: mol_type = other RNA
cccctctagcatcagaggga

SEQ ID NO: 343 - RNA, 20 nt, synthetic construct
  misc_feature 1..20: note = synthesized
  source 1..20: mol_type = other RNA
ctagagggactcacaggctg

SEQ ID NO: 344 - RNA, 20 nt, synthetic construct
  misc_feature 1..20: note = synthesized
  source 1..20: mol_type = other RNA
ctagaggggctcacaggctg

SEQ ID NO: 345 - RNA, 20 nt, synthetic construct
  misc_feature 1..20: note = synthesized
  source 1..20: mol_type = other RNA
ctgatgctagagggactcac

SEQ ID NO: 346 - RNA, 20 nt, synthetic construct
  misc_feature 1..20: note = synthesized
  source 1..20: mol_type = other RNA
ctgatgctagaggggctcac

SEQ ID NO: 347 - RNA, 20 nt, synthetic construct
  misc_feature 1..20: note = synthesized
  source 1..20: mol_type = other RNA
ctgtgagcccctctagcatc

SEQ ID NO: 348 - RNA, 20 nt, synthetic construct
  misc_feature 1..20: note = synthesized
  source 1..20: mol_type = other RNA
ctgtgagtccctctagcatc

SEQ ID NO: 349 - RNA, 20 nt, synthetic construct
  misc_feature 1..20: note = synthesized
  source 1..20: mol_type = other RNA
gactcacaggctgacctgat

SEQ ID NO: 350 - RNA, 20 nt, synthetic construct
  misc_feature 1..20: note = synthesized
  source 1..20: mol_type = other RNA
gagcccctctagcatcagag

SEQ ID NO: 351 - RNA, 20 nt, synthetic construct
  misc_feature 1..20: note = synthesized
  source 1..20: mol_type = other RNA
gagggactcacaggctgacc

SEQ ID NO: 352 - RNA, 20 nt, synthetic construct
  misc_feature 1..20: note = synthesized
  source 1..20: mol_type = other RNA
gaggggctcacaggctgacc

SEQ ID NO: 353 - RNA, 20 nt, synthetic construct
  misc_feature 1..20: note = synthesized
  source 1..20: mol_type = other RNA
gagtccctctagcatcagag

SEQ ID NO: 354 - RNA, 20 nt, synthetic construct
  misc_feature 1..20: note = synthesized
  source 1..20: mol_type = other RNA
gatgctagagggactcacag

SEQ ID NO: 355 - RNA, 20 nt, synthetic construct
  misc_feature 1..20: note = synthesized
  source 1..20: mol_type = other RNA
gatgctagaggggctcacag

SEQ ID NO: 356 - RNA, 20 nt, synthetic construct
  misc_feature 1..20: note = synthesized
  source 1..20: mol_type = other RNA
ggctcacaggctgacctgat

SEQ ID NO: 357 - RNA, 20 nt, synthetic construct
  misc_feature 1..20: note = synthesized
  source 1..20: mol_type = other RNA
gggactcacaggctgacctg

SEQ ID NO: 358 - RNA, 20 nt, synthetic construct
  misc_feature 1..20: note = synthesized
  source 1..20: mol_type = other RNA
ggggctcacaggctgacctg

SEQ ID NO: 359 - RNA, 20 nt, synthetic construct
  misc_feature 1..20: note = synthesized
  source 1..20: mol_type = other RNA
ggtcagcctgtgagcccctc

SEQ ID NO: 360 - RNA, 20 nt, synthetic construct
  misc_feature 1..20: note = synthesized
  source 1..20: mol_type = other RNA
ggtcagcctgtgagtccctc

SEQ ID NO: 361 - RNA, 20 nt, synthetic construct
  misc_feature 1..20: note = synthesized
  source 1..20: mol_type = other RNA
gtgagcccctctagcatcag

SEQ ID NO: 362 - RNA, 20 nt, synthetic construct
  misc_feature 1..20: note = synthesized
  source 1..20: mol_type = other RNA
gtgagtccctctagcatcag

SEQ ID NO: 363 - RNA, 20 nt, synthetic construct
  misc_feature 1..20: note = synthesized
  source 1..20: mol_type = other RNA
tccctctagcatcagaggga

SEQ ID NO: 364 - RNA, 20 nt, synthetic construct
  misc_feature 1..20: note = synthesized
  source 1..20: mol_type = other RNA
tgagcccctctagcatcaga

SEQ ID NO: 365 - RNA, 20 nt, synthetic construct
  misc_feature 1..20: note = synthesized
  source 1..20: mol_type = other RNA
tgagtccctctagcatcaga

SEQ ID NO: 366 - RNA, 20 nt, synthetic construct
  misc_feature 1..20: note = synthesized
  source 1..20: mol_type = other RNA
tgctagagggactcacaggc

SEQ ID NO: 367 - RNA, 20 nt, synthetic construct
  misc_feature 1..20: note = synthesized
  source 1..20: mol_type = other RNA
tgctagaggggctcacaggc

SEQ ID NO: 368 - RNA, 20 nt, synthetic construct
  misc_feature 1..20: note = synthesized
  source 1..20: mol_type = other RNA
aatgtctagcaaagaaccca

SEQ ID NO: 369 - RNA, 20 nt, synthetic construct
  misc_feature 1..20: note = synthesized
  source 1..20: mol_type = other RNA
aatgtttagcaaagaaccca

SEQ ID NO: 370 - RNA, 20 nt, synthetic construct
  misc_feature 1..20: note = synthesized
  source 1..20: mol_type = other RNA
accctgcaaaatgtctagca

SEQ ID NO: 371 - RNA, 20 nt, synthetic construct
  misc_feature 1..20: note = synthesized
  source 1..20: mol_type = other RNA
accctgcaaaatgtttagca

SEQ ID NO: 372 - RNA, 20 nt, synthetic construct
  misc_feature 1..20: note = synthesized
  source 1..20: mol_type = other RNA
ccctgcaaaatgtctagcaa

SEQ ID NO: 373 - RNA, 20 nt, synthetic construct
  misc_feature 1..20: note = synthesized
  source 1..20: mol_type = other RNA
ccctgcaaaatgtttagcaa

SEQ ID NO: 374 - RNA, 20 nt, synthetic construct
  misc_feature 1..20: note = synthesized
  source 1..20: mol_type = other RNA
gtctagcaaagaacccaaga

SEQ ID NO: 375 - RNA, 20 nt, synthetic construct
  misc_feature 1..20: note = synthesized
  source 1..20: mol_type = other RNA
gttctttgctaaacattttg

SEQ ID NO: 376 - RNA, 20 nt, synthetic construct
  misc_feature 1..20: note = synthesized
  source 1..20: mol_type = other RNA
gttctttgctagacattttg

SEQ ID NO: 377 - RNA, 20 nt, synthetic construct
  misc_feature 1..20: note = synthesized
  source 1..20: mol_type = other RNA
gtttagcaaagaacccaaga

SEQ ID NO: 378 - RNA, 20 nt, synthetic construct
  misc_feature 1..20: note = synthesized
  source 1..20: mol_type = other RNA
taaacattttgcagggtacc

SEQ ID NO: 379 - RNA, 20 nt, synthetic construct
  misc_feature 1..20: note = synthesized
  source 1..20: mol_type = other RNA
tagacattttgcagggtacc

SEQ ID NO: 380 - RNA, 20 nt, synthetic construct
  misc_feature 1..20: note = synthesized
  source 1..20: mol_type = other RNA
tctttgctaaacattttgca

SEQ ID NO: 381 - RNA, 20 nt, synthetic construct
  misc_feature 1..20: note = synthesized
  source 1..20: mol_type = other RNA
tctttgctagacattttgca

SEQ ID NO: 382 - RNA, 20 nt, synthetic construct
  misc_feature 1..20: note = synthesized
  source 1..20: mol_type = other RNA
tgctaaacattttgcagggt

SEQ ID NO: 383 - RNA, 20 nt, synthetic construct
  misc_feature 1..20: note = synthesized
  source 1..20: mol_type = other RNA
tgctagacattttgcagggt

SEQ ID NO: 384 - RNA, 20 nt, synthetic construct
  misc_feature 1..20: note = synthesized
  source 1..20: mol_type = other RNA
ttctttgctaaacattttgc

SEQ ID NO: 385 - RNA, 20 nt, synthetic construct
  misc_feature 1..20: note = synthesized
  source 1..20: mol_type = other RNA
ttctttgctagacattttgc

SEQ ID NO: 386 - RNA, 20 nt, synthetic construct
  misc_feature 1..20: note = synthesized
  source 1..20: mol_type = other RNA
agaaagggtaggaagaaatg

SEQ ID NO: 387 - RNA, 20 nt, synthetic construct
  misc_feature 1..20: note = synthesized
  source 1..20: mol_type = other RNA
agagaaagggtaggaagaaa

SEQ ID NO: 388 - RNA, 20 nt, synthetic construct
  misc_feature 1..20: note = synthesized
  source 1..20: mol_type = other RNA
agagatagggtaggaagaaa

SEQ ID NO: 389 - RNA, 20 nt, synthetic construct
  misc_feature 1..20: note = synthesized
  source 1..20: mol_type = other RNA
agatagggtaggaagaaatg

SEQ ID NO: 390 - RNA, 20 nt, synthetic construct
  misc_feature 1..20: note = synthesized
  source 1..20: mol_type = other RNA
caacttatctggaagagaaa

SEQ ID NO: 391 - RNA, 20 nt, synthetic construct
  misc_feature 1..20: note = synthesized
  source 1..20: mol_type = other RNA
caacttatctggaagagata

SEQ ID NO: 392 - RNA, 20 nt, synthetic construct
  misc_feature 1..20: note = synthesized
  source 1..20: mol_type = other RNA
ccaacttatctggaagagaa

SEQ ID NO: 393 - RNA, 20 nt, synthetic construct
  misc_feature 1..20: note = synthesized
  source 1..20: mol_type = other RNA
ccaacttatctggaagagat

SEQ ID NO: 394 - RNA, 20 nt, synthetic construct
  misc_feature 1..20: note = synthesized
  source 1..20: mol_type = other RNA
cctatctcttccagataagt

SEQ ID NO: 395 - RNA, 20 nt, synthetic construct
  misc_feature 1..20: note = synthesized
  source 1..20: mol_type = other RNA
cctttctcttccagataagt

SEQ ID NO: 396 - RNA, 20 nt, synthetic construct
  misc_feature 1..20: note = synthesized
  source 1..20: mol_type = other RNA
ctggaagagaaagggtagga

SEQ ID NO: 397 - RNA, 20 nt, synthetic construct
  misc_feature 1..20: note = synthesized
  source 1..20: mol_type = other RNA
ctggaagagatagggtagga

SEQ ID NO: 398 - RNA, 20 nt, synthetic construct
  misc_feature 1..20: note = synthesized
  source 1..20: mol_type = other RNA
cttcctaccctatctcttcc

SEQ ID NO: 399 - RNA, 20 nt, synthetic construct
  misc_feature 1..20: note = synthesized
  source 1..20: mol_type = other RNA
cttcctaccctttctcttcc

SEQ ID NO: 400 - RNA, 20 nt, synthetic construct
  misc_feature 1..20: note = synthesized
  source 1..20: mol_type = other RNA
gaaagggtaggaagaaatgg

SEQ ID NO: 401 - RNA, 20 nt, synthetic construct
  misc_feature 1..20: note = synthesized
  source 1..20: mol_type = other RNA
gagaaagggtaggaagaaat

SEQ ID NO: 402 - RNA, 20 nt, synthetic construct
  misc_feature 1..20: note = synthesized
  source 1..20: mol_type = other RNA
gagatagggtaggaagaaat

SEQ ID NO: 403 - RNA, 20 nt, synthetic construct
  misc_feature 1..20: note = synthesized
  source 1..20: mol_type = other RNA
gatagggtaggaagaaatgg

SEQ ID NO: 404 - RNA, 20 nt, synthetic construct
  misc_feature 1..20: note = synthesized
  source 1..20: mol_type = other RNA
tatctggaagagaaagggta

SEQ ID NO: 405 - RNA, 20 nt, synthetic construct
  misc_feature 1..20: note = synthesized
  source 1..20: mol_type = other RNA
tatctggaagagatagggta

SEQ ID NO: 406 - RNA, 20 nt, synthetic construct
  misc_feature 1..20: note = synthesized
  source 1..20: mol_type = other RNA
ttatctggaagagaaagggt

SEQ ID NO: 407 - RNA, 20 nt, synthetic construct
  misc_feature 1..20: note = synthesized
  source 1..20: mol_type = other RNA
ttatctggaagagatagggt

SEQ ID NO: 408 - RNA, 20 nt, synthetic construct
  misc_feature 1..20: note = synthesized
  source 1..20: mol_type = other RNA
ttcttcctaccctatctctt

SEQ ID NO: 409 - RNA, 20 nt, synthetic construct
  misc_feature 1..20: note = synthesized
  source 1..20: mol_type = other RNA
ttcttcctaccctttctctt

SEQ ID NO: 410 - RNA, 20 nt, synthetic construct
  misc_feature 1..20: note = synthesized
  source 1..20: mol_type = other RNA
caggagttataaggtactgc

SEQ ID NO: 411 - RNA, 20 nt, synthetic construct
  misc_feature 1..20: note = synthesized
  source 1..20: mol_type = other RNA
tccaggagttataaggtact

SEQ ID NO: 412 - RNA, 20 nt, synthetic construct
  misc_feature 1..20: note = synthesized
  source 1..20: mol_type = other RNA
tgactctgcttggtttttcc

SEQ ID NO: 413 - RNA, 20 nt, synthetic construct
  misc_feature 1..20: note = synthesized
  source 1..20: mol_type = other RNA
ttgactctgcttggtttttc

SEQ ID NO: 414 - RNA, 20 nt, synthetic construct
  misc_feature 1..20: note = synthesized
  source 1..20: mol_type = other RNA
ctgttcgcatgaaaattagg

SEQ ID NO: 415 - RNA, 20 nt, synthetic construct
  misc_feature 1..20: note = synthesized
  source 1..20: mol_type = other RNA
gctgttcgcatgaaaattag

SEQ ID NO: 416 - RNA, 20 nt, synthetic construct
  misc_feature 1..20: note = synthesized
  source 1..20: mol_type = other RNA
gttcgcatgaaaattaggcc

SEQ ID NO: 417 - RNA, 20 nt, synthetic construct
  misc_feature 1..20: note = synthesized
  source 1..20: mol_type = other RNA
tcttcagcctattgggtcac

SEQ ID NO: 418 - RNA, 20 nt, synthetic construct
  misc_feature 1..20: note = synthesized
  source 1..20: mol_type = other RNA
tgttcgcatgaaaattaggc

SEQ ID NO: 419 - RNA, 20 nt, synthetic construct
  misc_feature 1..20: note = synthesized
  source 1..20: mol_type = other RNA
aaaaagcatgtgacaataag

SEQ ID NO: 420 - RNA, 20 nt, synthetic construct
  misc_feature 1..20: note = synthesized
  source 1..20: mol_type = other RNA
aaggatgtttgatatatcta

SEQ ID NO: 421 - RNA, 20 nt, synthetic construct
  misc_feature 1..20: note = synthesized
  source 1..20: mol_type = other RNA
aagtgaaatgagcagatata

SEQ ID NO: 422 - RNA, 20 nt, synthetic construct
  misc_feature 1..20: note = synthesized
  source 1..20: mol_type = other RNA
accagctaagcagtatttgt

SEQ ID NO: 423 - RNA, 20 nt, synthetic construct
  misc_feature 1..20: note = synthesized
  source 1..20: mol_type = other RNA
aggatgtttgatatatctat

SEQ ID NO: 424 - RNA, 20 nt, synthetic construct
  misc_feature 1..20: note = synthesized
  source 1..20: mol_type = other RNA
agttttgcacatttaaagat

SEQ ID NO: 425 - RNA, 20 nt, synthetic construct
  misc_feature 1..20: note = synthesized
  source 1..20: mol_type = other RNA
atattacattaacttcaaaa

SEQ ID NO: 426 - RNA, 20 nt, synthetic construct
  misc_feature 1..20: note = synthesized
  source 1..20: mol_type = other RNA
cagctaagcagtatttgtct

SEQ ID NO: 427 - RNA, 20 nt, synthetic construct
  misc_feature 1..20: note = synthesized
  source 1..20: mol_type = other RNA
cagttttgcacatttaaaga

SEQ ID NO: 428 - RNA, 20 nt, synthetic construct
  misc_feature 1..20: note = synthesized
  source 1..20: mol_type = other RNA
ccagctaagcagtatttgtc

SEQ ID NO: 429 - RNA, 20 nt, synthetic construct
  misc_feature 1..20: note = synthesized
  source 1..20: mol_type = other RNA
gaaggatgtttgatatatct

SEQ ID NO: 430 - RNA, 20 nt, synthetic construct
  misc_feature 1..20: note = synthesized
  source 1..20: mol_type = other RNA
gaccagctaagcagtatttg

SEQ ID NO: 431 - RNA, 20 nt, synthetic construct
  misc_feature 1..20: note = synthesized
  source 1..20: mol_type = other RNA
ggatgtttgatatatctatc

SEQ ID NO: 432 - RNA, 20 nt, synthetic construct
  misc_feature 1..20: note = synthesized
  source 1..20: mol_type = other RNA
gtgaaatgagcagatataga

SEQ ID NO: 433 - RNA, 20 nt, synthetic construct
  misc_feature 1..20: note = synthesized
  source 1..20: mol_type = other RNA
gttttgcacatttaaagata

SEQ ID NO: 434 - RNA, 20 nt, synthetic construct
  misc_feature 1..20: note = synthesized
  source 1..20: mol_type = other RNA
tatattacattaacttcaaa

SEQ ID NO: 435 - RNA, 20 nt, synthetic construct
  misc_feature 1..20: note = synthesized
  source 1..20: mol_type = other RNA
ttatattacattaacttcaa

SEQ ID NO: 436 - RNA, 20 nt, synthetic construct
  misc_feature 1..20: note = synthesized
  source 1..20: mol_type = other RNA
tttatattacattaacttca

SEQ ID NO: 437 - RNA, 20 nt, synthetic construct
  misc_feature 1..20: note = synthesized
  source 1..20: mol_type = other RNA
ttttgcacatttaaagatac

SEQ ID NO: 438 - RNA, 20 nt, synthetic construct
  misc_feature 1..20: note = synthesized
  source 1..20: mol_type = other RNA
aatagagtaatagctaatgt

SEQ ID NO: 439 - RNA, 20 nt, synthetic construct
  misc_feature 1..20: note = synthesized
  source 1..20: mol_type = other RNA
acccaagacttagtaaacat

SEQ ID NO: 440 - RNA, 20 nt, synthetic construct
  misc_feature 1..20: note = synthesized
  source 1..20: mol_type = other RNA
agagtaatagctaatgtgta

SEQ ID NO: 441 - RNA, 20 nt, synthetic construct
  misc_feature 1..20: note = synthesized
  source 1..20: mol_type = other RNA
atagagtaatagctaatgtg

SEQ ID NO: 442 - RNA, 20 nt, synthetic construct
  misc_feature 1..20: note = synthesized
  source 1..20: mol_type = other RNA
ccaagacttagtaaacattc

SEQ ID NO: 443 - RNA, 20 nt, synthetic construct
  misc_feature 1..20: note = synthesized
  source 1..20: mol_type = other RNA
cccaagacttagtaaacatt

SEQ ID NO: 444 - RNA, 20 nt, synthetic construct
  misc_feature 1..20: note = synthesized
  source 1..20: mol_type = other RNA
tagagtaatagctaatgtgt

SEQ ID NO: 445 - RNA, 20 nt, synthetic construct
  misc_feature 1..20: note = synthesized
  source 1..20: mol_type = other RNA
cagctgaaagaaaggattgc

SEQ ID NO: 446 - RNA, 20 nt, synthetic construct
  misc_feature 1..20: note = synthesized
  source 1..20: mol_type = other RNA
ccagctgaaagaaaggattg

SEQ ID NO: 447 - RNA, 20 nt, synthetic construct
  misc_feature 1..20: note = synthesized
  source 1..20: mol_type = other RNA
taggatgggaactaggagtg

SEQ ID NO: 448 - RNA, 20 nt, synthetic construct
  misc_feature 1..20: note = synthesized
  source 1..20: mol_type = other RNA
tccagctgaaagaaaggatt

SEQ ID NO: 449 - RNA, 20 nt, synthetic construct
  misc_feature 1..20: note = synthesized
  source 1..20: mol_type = other RNA
aaagaagacagagtgctccc

SEQ ID NO: 450 - RNA, 20 nt, synthetic construct
  misc_feature 1..20: note = synthesized
  source 1..20: mol_type = other RNA
aagaagacagagtgctccca

SEQ ID NO: 451 - RNA, 20 nt, synthetic construct
  misc_feature 1..20: note = synthesized
  source 1..20: mol_type = other RNA
aatgggagcactctgtcttc

SEQ ID NO: 452 - RNA, 20 nt, synthetic construct
  misc_feature 1..20: note = synthesized
  source 1..20: mol_type = other RNA
actctgtcttctttgctaga

SEQ ID NO: 453 - RNA, 20 nt, synthetic construct
  misc_feature 1..20: note = synthesized
  source 1..20: mol_type = other RNA
agaagacagagtgctcccat

SEQ ID NO: 454 - RNA, 20 nt, synthetic construct
  misc_feature 1..20: note = synthesized
  source 1..20: mol_type = other RNA
agcaaagaagacagagtgct

SEQ ID NO: 455 - RNA, 20 nt, synthetic construct
  misc_feature 1..20: note = synthesized
  source 1..20: mol_type = other RNA
atgggagcactctgtcttct

SEQ ID NO: 456 - RNA, 20 nt, synthetic construct
  misc_feature 1..20: note = synthesized
  source 1..20: mol_type = other RNA
caaagaagacagagtgctcc

SEQ ID NO: 457 - RNA, 20 nt, synthetic construct
  misc_feature 1..20: note = synthesized
  source 1..20: mol_type = other RNA
cacttctctagcaaagaaga

SEQ ID NO: 458 - RNA, 20 nt, synthetic construct
  misc_feature 1..20: note = synthesized
  source 1..20: mol_type = other RNA
ccacttctctagcaaagaag

SEQ ID NO: 459 - RNA, 20 nt, synthetic construct
  misc_feature 1..20: note = synthesized
  source 1..20: mol_type = other RNA
ctagcaaagaagacagagtg

SEQ ID NO: 460 - RNA, 20 nt, synthetic construct
  misc_feature 1..20: note = synthesized
  source 1..20: mol_type = other RNA
ctctagcaaagaagacagag

SEQ ID NO: 461 - RNA, 20 nt, synthetic construct
  misc_feature 1..20: note = synthesized
  source 1..20: mol_type = other RNA
ctctgtcttctttgctagag

SEQ ID NO: 462 - RNA, 20 nt, synthetic construct
  misc_feature 1..20: note = synthesized
  source 1..20: mol_type = other RNA
ctgtcttctttgctagagaa

SEQ ID NO: 463 - RNA, 20 nt, synthetic construct
  misc_feature 1..20: note = synthesized
  source 1..20: mol_type = other RNA
cttctctagcaaagaagaca

SEQ ID NO: 464 - RNA, 20 nt, synthetic construct
  misc_feature 1..20: note = synthesized
  source 1..20: mol_type = other RNA
gaatgggagcactctgtctt

SEQ ID NO: 465 - RNA, 20 nt, synthetic construct
  misc_feature 1..20: note = synthesized
  source 1..20: mol_type = other RNA
gagcactctgtcttctttgc

SEQ ID NO: 466 - RNA, 20 nt, synthetic construct
  misc_feature 1..20: note = synthesized
  source 1..20: mol_type = other RNA
gcaaagaagacagagtgctc

SEQ ID NO: 467 - RNA, 20 nt, synthetic construct
  misc_feature 1..20: note = synthesized
  source 1..20: mol_type = other RNA
gcactctgtcttctttgcta

SEQ ID NO: 468 - RNA, 20 nt, synthetic construct
  misc_feature 1..20: note = synthesized
  source 1..20: mol_type = other RNA
ggaatgggagcactctgtct

SEQ ID NO: 469 - RNA, 20 nt, synthetic construct
  misc_feature 1..20: note = synthesized
  source 1..20: mol_type = other RNA
ggagcactctgtcttctttg

SEQ ID NO: 470 - RNA, 20 nt, synthetic construct
  misc_feature 1..20: note = synthesized
  source 1..20: mol_type = other RNA
gggaatgggagcactctgtc

SEQ ID NO: 471 - RNA, 20 nt, synthetic construct
  misc_feature 1..20: note = synthesized
  source 1..20: mol_type = other RNA
gggagcactctgtcttcttt

SEQ ID NO: 472 - RNA, 20 nt, synthetic construct
  misc_feature 1..20: note = synthesized
  source 1..20: mol_type = other RNA
tagcaaagaagacagagtgc

SEQ ID NO: 473 - RNA, 20 nt, synthetic construct
  misc_feature 1..20: note = synthesized
  source 1..20: mol_type = other RNA
tccacttctctagcaaagaa

SEQ ID NO: 474 - RNA, 20 nt, synthetic construct
  misc_feature 1..20: note = synthesized
  source 1..20: mol_type = other RNA
tctagcaaagaagacagagt

SEQ ID NO: 475 - RNA, 20 nt, synthetic construct
  misc_feature 1..20: note = synthesized
  source 1..20: mol_type = other RNA
tctccacttctctagcaaag

SEQ ID NO: 476 - RNA, 20 nt, synthetic construct
  misc_feature 1..20: note = synthesized
  source 1..20: mol_type = other RNA
tctctagcaaagaagacaga

SEQ ID NO: 477 - RNA, 20 nt, synthetic construct
  misc_feature 1..20: note = synthesized
  source 1..20: mol_type = other RNA
tcttctttgctagagaagtg

SEQ ID NO: 478 - RNA, 20 nt, synthetic construct
  misc_feature 1..20: note = synthesized
  source 1..20: mol_type = other RNA
tgggagcactctgtcttctt

SEQ ID NO: 479 - RNA, 20 nt, synthetic construct
  misc_feature 1..20: note = synthesized
  source 1..20: mol_type = other RNA
ttctctccacttctctagca

SEQ ID NO: 480 - RNA, 20 nt, synthetic construct
  misc_feature 1..20: note = synthesized
  source 1..20: mol_type = other RNA
ttctttgctagagaagtgga

SEQ ID NO: 481 - RNA, 20 nt, synthetic construct
  misc_feature 1..20: note = synthesized
  source 1..20: mol_type = other RNA
tttctctccacttctctagc

SEQ ID NO: 482 - RNA, 20 nt, synthetic construct
  misc_feature 1..20: note = synthesized
  source 1..20: mol_type = other RNA
tttgctagagaagtggagag

SEQ ID NO: 483 - RNA, 20 nt, synthetic construct
  misc_feature 1..20: note = synthesized
  source 1..20: mol_type = other RNA
ttttctctccacttctctag

SEQ ID NO: 484 - RNA, 20 nt, synthetic construct
  misc_feature 1..20: note = synthesized
  source 1..20: mol_type = other RNA
cctcattccagagtttctct

SEQ ID NO: 485 - RNA, 20 nt, synthetic construct
  misc_feature 1..20: note = synthesized
  source 1..20: mol_type = other RNA
ggtaagaggactagttagag

SEQ ID NO: 486 - RNA, 20 nt, synthetic construct
  misc_feature 1..20: note = synthesized
  source 1..20: mol_type = other RNA
gtaagaggactagttagagg

SEQ ID NO: 487 - RNA, 20 nt, synthetic construct
  misc_feature 1..20: note = synthesized
  source 1..20: mol_type = other RNA
taagaggactagttagaggt

SEQ ID NO: 488 - RNA, 20 nt, synthetic construct
  misc_feature 1..20: note = synthesized
  source 1..20: mol_type = other RNA
tcattccagagtttctctgc

SEQ ID NO: 489 - RNA, 20 nt, synthetic construct
  misc_feature 1..20: note = synthesized
  source 1..20: mol_type = other RNA
agcataagtgggttccagag

SEQ ID NO: 490 - RNA, 20 nt, synthetic construct
  misc_feature 1..20: note = synthesized
  source 1..20: mol_type = other RNA
cataagtgggttccagagat

SEQ ID NO: 491 - RNA, 20 nt, synthetic construct
  misc_feature 1..20: note = synthesized
  source 1..20: mol_type = other RNA
ggaggcagccaggcaacttc

SEQ ID NO: 492 - RNA, 20 nt, synthetic construct
  misc_feature 1..20: note = synthesized
  source 1..20: mol_type = other RNA
gggaggcagccaggcaactt

SEQ ID NO: 493 - RNA, 20 nt, synthetic construct
  misc_feature 1..20: note = synthesized
  source 1..20: mol_type = other RNA
gggggaggcagccaggcaac

SEQ ID NO: 494 - RNA, 20 nt, synthetic construct
  misc_feature 1..20: note = synthesized
  source 1..20: mol_type = other RNA
attctgatataactgcatta

SEQ ID NO: 495 - RNA, 20 nt, synthetic construct
  misc_feature 1..20: note = synthesized
  source 1..20: mol_type = other RNA
ccctctctccttccttcttt

SEQ ID NO: 496 - RNA, 20 nt, synthetic construct
  misc_feature 1..20: note = synthesized
  source 1..20: mol_type = other RNA
tattctgatataactgcatt

SEQ ID NO: 497 - RNA, 20 nt, synthetic construct
  misc_feature 1..20: note = synthesized
  source 1..20: mol_type = other RNA
tctgatataactgcattatc

SEQ ID NO: 498 - RNA, 20 nt, synthetic construct
  misc_feature 1..20: note = synthesized
  source 1..20: mol_type = other RNA
ttctgatataactgcattat

SEQ ID NO: 499 - RNA, 20 nt, synthetic construct
  misc_feature 1..20: note = synthesized
  source 1..20: mol_type = other RNA
attagtgggtgaacagacag

SEQ ID NO: 500 - RNA, 20 nt, synthetic construct
  misc_feature 1..20: note = synthesized
  source 1..20: mol_type = other RNA
tagtgggtgaacagacagga

SEQ ID NO: 501 - RNA, 20 nt, synthetic construct
  misc_feature 1..20: note = synthesized
  source 1..20: mol_type = other RNA
tgcctgagcatgcaactgaa

SEQ ID NO: 502 - RNA, 20 nt, synthetic construct
  misc_feature 1..20: note = synthesized
  source 1..20: mol_type = other RNA
ttagtgggtgaacagacagg

SEQ ID NO: 503 - RNA, 20 nt, synthetic construct
  misc_feature 1..20: note = synthesized
  source 1..20: mol_type = other RNA
ttgcctgagcatgcaactga

SEQ ID NO: 504 - RNA, 20 nt, synthetic construct
  misc_feature 1..20: note = synthesized
  source 1..20: mol_type = other RNA
tttgcctgagcatgcaactg

SEQ ID NO: 505 - RNA, 20 nt, synthetic construct
  misc_feature 1..20: note = synthesized
  source 1..20: mol_type = other RNA
ttttgcctgagcatgcaact

SEQ ID NO: 506 - RNA, 20 nt, synthetic construct
  misc_feature 1..20: note = synthesized
  source 1..20: mol_type = other RNA
cccagagttccagcttccag

SEQ ID NO: 507 - RNA, 20 nt, synthetic construct
  misc_feature 1..20: note = synthesized
  source 1..20: mol_type = other RNA
ctcccagagttccagcttcc

SEQ ID NO: 508 - RNA, 20 nt, synthetic construct
  misc_feature 1..20: note = synthesized
  source 1..20: mol_type = other RNA
gctcccagagttccagcttc

SEQ ID NO: 509 - RNA, 20 nt, synthetic construct
  misc_feature 1..20: note = synthesized
  source 1..20: mol_type = other RNA
ggagctctggacctggaagt

SEQ ID NO: 510 - RNA, 20 nt, synthetic construct
  misc_feature 1..20: note = synthesized
  source 1..20: mol_type = other RNA
gggagctctggacctggaag

SEQ ID NO: 511 - RNA, 20 nt, synthetic construct
  misc_feature 1..20: note = synthesized
  source 1..20: mol_type = other RNA
tcccagagttccagcttcca

SEQ ID NO: 512 - RNA, 20 nt, synthetic construct
  misc_feature 1..20: note = synthesized
  source 1..20: mol_type = other RNA
tgggagctctggacctggaa

SEQ ID NO: 513 - RNA, 20 nt, synthetic construct
  misc_feature 1..20: note = synthesized
  source 1..20: mol_type = other RNA
acaaagcttcctgaggccaa

SEQ ID NO: 514 - RNA, 20 nt, synthetic construct
  misc_feature 1..20: note = synthesized
  source 1..20: mol_type = other RNA
acacaaagcttcctgaggcc

SEQ ID NO: 515 - RNA, 20 nt, synthetic construct
  misc_feature 1..20: note = synthesized
  source 1..20: mol_type = other RNA
acatttgtgccagtccttgt

SEQ ID NO: 516 - RNA, 20 nt, synthetic construct
  misc_feature 1..20: note = synthesized
  source 1..20: mol_type = other RNA
caaagcttcctgaggccaag

SEQ ID NO: 517 - RNA, 20 nt, synthetic construct
  misc_feature 1..20: note = synthesized
  source 1..20: mol_type = other RNA
catttgtgccagtccttgtg

SEQ ID NO: 518 - RNA, 20 nt, synthetic construct
  misc_feature 1..20: note = synthesized
  source 1..20: mol_type = other RNA
gacatttgtgccagtccttg

SEQ ID NO: 519 - RNA, 20 nt, synthetic construct
  misc_feature 1..20: note = synthesized
  source 1..20: mol_type = other RNA
tgacatttgtgccagtcctt

SEQ ID NO: 520 - RNA, 20 nt, synthetic construct
  misc_feature 1..20: note = synthesized
  source 1..20: mol_type = other RNA
aattgaatagttacctacat

SEQ ID NO: 521 - RNA, 20 nt, synthetic construct
  misc_feature 1..20: note = synthesized
  source 1..20: mol_type = other RNA
aggttccttttctttatttg

SEQ ID NO: 522 - RNA, 20 nt, synthetic construct
  misc_feature 1..20: note = synthesized
  source 1..20: mol_type = other RNA
agtaggttccttttctttat

SEQ ID NO: 523 - RNA, 20 nt, synthetic construct
  misc_feature 1..20: note = synthesized
  source 1..20: mol_type = other RNA
ataattgaatagttacctac

SEQ ID NO: 524 - RNA, 20 nt, synthetic construct
  misc_feature 1..20: note = synthesized
  source 1..20: mol_type = other RNA
gtaggttccttttctttatt

SEQ ID NO: 525 - RNA, 20 nt, synthetic construct
  misc_feature 1..20: note = synthesized
  source 1..20: mol_type = other RNA
taattgaatagttacctaca

SEQ ID NO: 526 - RNA, 20 nt, synthetic construct
  misc_feature 1..20: note = synthesized
  source 1..20: mol_type = other RNA
taggttccttttctttattt

SEQ ID NO: 527 - RNA, 20 nt, synthetic construct
  misc_feature 1..20: note = synthesized
  source 1..20: mol_type = other RNA
gcattatgattttgggtggt

SEQ ID NO: 528 - RNA, 20 nt, synthetic construct
  misc_feature 1..20: note = synthesized
  source 1..20: mol_type = other RNA
ggcattatgattttgggtgg

SEQ ID NO: 529 - RNA, 20 nt, synthetic construct
  misc_feature 1..20: note = synthesized
  source 1..20: mol_type = other RNA
ggtttgagaacttctcttcc

SEQ ID NO: 530 - RNA, 20 nt, synthetic construct
  misc_feature 1..20: note = synthesized
  source 1..20: mol_type = other RNA
tggtttgagaacttctcttc

SEQ ID NO: 531 - RNA, 20 nt, synthetic construct
  misc_feature 1..20: note = synthesized
  source 1..20: mol_type = other RNA
ttggtttgagaacttctctt

SEQ ID NO: 532 - RNA, 20 nt, synthetic construct
  misc_feature 1..20: note = synthesized
  source 1..20: mol_type = other RNA
agttgcttaaattataatct

SEQ ID NO: 533 - RNA, 20 nt, synthetic construct
  misc_feature 1..20: note = synthesized
  source 1..20: mol_type = other RNA
caaaaagaaaaagccaatgc

SEQ ID NO: 534 - RNA, 20 nt, synthetic construct
  misc_feature 1..20: note = synthesized
  source 1..20: mol_type = other RNA
ctcaaaaagaaaaagccaat

SEQ ID NO: 535 - RNA, 20 nt, synthetic construct
  misc_feature 1..20: note = synthesized
  source 1..20: mol_type = other RNA
gttgcttaaattataatctg

SEQ ID NO: 536 - RNA, 20 nt, synthetic construct
  misc_feature 1..20: note = synthesized
  source 1..20: mol_type = other RNA
tgcttaaattataatctgcc

SEQ ID NO: 537 - RNA, 20 nt, synthetic construct
  misc_feature 1..20: note = synthesized
  source 1..20: mol_type = other RNA
aatgagggtccacttagcca

SEQ ID NO: 538 - RNA, 20 nt, synthetic construct
  misc_feature 1..20: note = synthesized
  source 1..20: mol_type = other RNA
cctcaatttcctggcaccta

SEQ ID NO: 539 - RNA, 20 nt, synthetic construct
  misc_feature 1..20: note = synthesized
  source 1..20: mol_type = other RNA
ctcaatttcctggcacctaa

SEQ ID NO: 540 - RNA, 20 nt, synthetic construct
  misc_feature 1..20: note = synthesized
  source 1..20: mol_type = other RNA
gaatgagggtccacttagcc

SEQ ID NO: 541 - RNA, 20 nt, synthetic construct
  misc_feature 1..20: note = synthesized
  source 1..20: mol_type = other RNA
gcctcaatttcctggcacct

SEQ ID NO: 542 - RNA, 20 nt, synthetic construct
  misc_feature 1..20: note = synthesized
  source 1..20: mol_type = other RNA
tcaatttcctggcacctaat

SEQ ID NO: 543 - RNA, 20 nt, synthetic construct
  misc_feature 1..20: note = synthesized
  source 1..20: mol_type = other RNA
tgagggtccacttagccata

SEQ ID NO: 544 - RNA, 20 nt, synthetic construct
  misc_feature 1..20: note = synthesized
  source 1..20: mol_type = other RNA
agagtttgtcagtgagactg

SEQ ID NO: 545 - RNA, 20 nt, synthetic construct
  misc_feature 1..20: note = synthesized
  source 1..20: mol_type = other RNA
cagattctgagcccctagac

SEQ ID NO: 546 - RNA, 20 nt, synthetic construct
  misc_feature 1..20: note = synthesized
  source 1..20: mol_type = other RNA
gagagtttgtcagtgagact

SEQ ID NO: 547 - RNA, 20 nt, synthetic construct
  misc_feature 1..20: note = synthesized
  source 1..20: mol_type = other RNA
gccagattctgagcccctag

SEQ ID NO: 548 - RNA, 20 nt, synthetic construct
  misc_feature 1..20: note = synthesized
  source 1..20: mol_type = other RNA
tgccagattctgagccccta

SEQ ID NO: 549 - RNA, 20 nt, synthetic construct
  misc_feature 1..20: note = synthesized
  source 1..20: mol_type = other RNA
cgccttccttttccctctac

SEQ ID NO: 550 - RNA, 20 nt, synthetic construct
  misc_feature 1..20: note = synthesized
  source 1..20: mol_type = other RNA
cttccttttccctctactca

SEQ ID NO: 551 - RNA, 20 nt, synthetic construct
  misc_feature 1..20: note = synthesized
  source 1..20: mol_type = other RNA
gccttccttttccctctact

SEQ ID NO: 552 - RNA, 20 nt, synthetic construct
  misc_feature 1..20: note = synthesized
  source 1..20: mol_type = other RNA
gtggtcccagatgtccttgt

SEQ ID NO: 553 - RNA, 20 nt, synthetic construct
  misc_feature 1..20: note = synthesized
  source 1..20: mol_type = other RNA
tggtcccagatgtccttgtt

SEQ ID NO: 554 - RNA, 20 nt, synthetic construct
  misc_feature 1..20: note = synthesized
  source 1..20: mol_type = other RNA
tgtggtcccagatgtccttg

SEQ ID NO: 555 - RNA, 20 nt, synthetic construct
  misc_feature 1..20: note = synthesized
  source 1..20: mol_type = other RNA
accaatcaggtcagcctgtg

SEQ ID NO: 556 - RNA, 20 nt, synthetic construct
  misc_feature 1..20: note = synthesized
  source 1..20: mol_type = other RNA
caatcaggtcagcctgtgag

SEQ ID NO: 557 - RNA, 20 nt, synthetic construct
  misc_feature 1..20: note = synthesized
  source 1..20: mol_type = other RNA
ccaatcaggtcagcctgtga

SEQ ID NO: 558 - RNA, 20 nt, synthetic construct
  misc_feature 1..20: note = synthesized
  source 1..20: mol_type = other RNA
cttccctctgatgctagagg

SEQ ID NO: 559 - RNA, 20 nt, synthetic construct
  misc_feature 1..20: note = synthesized
  source 1..20: mol_type = other RNA
gaccaatcaggtcagcctgt

SEQ ID NO: 560 - RNA, 20 nt, synthetic construct
  misc_feature 1..20: note = synthesized
  source 1..20: mol_type = other RNA
aagtcttgggttctttgcta

SEQ ID NO: 561 - RNA, 20 nt, synthetic construct
  misc_feature 1..20: note = synthesized
  source 1..20: mol_type = other RNA
aatcaggtaccctgcaaaat

SEQ ID NO: 562 - RNA, 20 nt, synthetic construct
  misc_feature 1..20: note = synthesized
  source 1..20: mol_type = other RNA
ctaagtcttgggttctttgc

SEQ ID NO: 563 - RNA, 20 nt, synthetic construct
  misc_feature 1..20: note = synthesized
  source 1..20: mol_type = other RNA
gaatcaggtaccctgcaaaa

SEQ ID NO: 564 - RNA, 20 nt, synthetic construct
  misc_feature 1..20: note = synthesized
  source 1..20: mol_type = other RNA
tcaggtaccctgcaaaatgt

SEQ ID NO: 565 - RNA, 20 nt, synthetic construct
  misc_feature 1..20: note = synthesized
  source 1..20: mol_type = other RNA
aagccaacttatctggaaga

SEQ ID NO: 566 - RNA, 20 nt, synthetic construct
  misc_feature 1..20: note = synthesized
  source 1..20: mol_type = other RNA
agccaacttatctggaagag

SEQ ID NO: 567 - RNA, 20 nt, synthetic construct
  misc_feature 1..20: note = synthesized
  source 1..20: mol_type = other RNA
agcccccatttcttcctacc

SEQ ID NO: 568 - RNA, 20 nt, synthetic construct
  misc_feature 1..20: note = synthesized
  source 1..20: mol_type = other RNA
cagcccccatttcttcctac

SEQ ID NO: 569 - RNA, 20 nt, synthetic construct
  misc_feature 1..20: note = synthesized
  source 1..20: mol_type = other RNA
cccccatttcttcctaccct

SEQ ID NO: 570 - RNA, 20 nt, synthetic construct
  misc_feature 1..20: note = synthesized
  source 1..20: mol_type = other RNA
gcccccatttcttcctaccc

SEQ ID NO: 571 - RNA, 20 nt, synthetic construct
  misc_feature 1..20: note = synthesized
  source 1..20: mol_type = other RNA
acacagtctcactgacaaac

SEQ ID NO: 572 - RNA, 20 nt, synthetic construct
  misc_feature 1..20: note = synthesized
  source 1..20: mol_type = other RNA
acagtctcactgacaaactc

SEQ ID NO: 573 - RNA, 20 nt, synthetic construct
  misc_feature 1..20: note = synthesized
  source 1..20: mol_type = other RNA
actcagtctcactgacaaac

SEQ ID NO: 574 - RNA, 20 nt, synthetic construct
  misc_feature 1..20: note = synthesized
  source 1..20: mol_type = other RNA
actgagtctaggggctcaga

SEQ ID NO: 575 - RNA, 20 nt, synthetic construct
  misc_feature 1..20: note = synthesized
  source 1..20: mol_type = other RNA
actgtgtctaggggctcaga

SEQ ID NO: 576 - RNA, 20 nt, synthetic construct
  misc_feature 1..20: note = synthesized
  source 1..20: mol_type = other RNA
agacacagtctcactgacaa

SEQ ID NO: 577 - RNA, 20 nt, synthetic construct
  misc_feature 1..20: note = synthesized
  source 1..20: mol_type = other RNA
agactcagtctcactgacaa

SEQ ID NO: 578 - RNA, 20 nt, synthetic construct
  misc_feature 1..20: note = synthesized
  source 1..20: mol_type = other RNA
agactgagtctaggggctca

SEQ ID NO: 579 - RNA, 20 nt, synthetic construct
  misc_feature 1..20: note = synthesized
  source 1..20: mol_type = other RNA
agactgtgtctaggggctca

SEQ ID NO: 580 - RNA, 20 nt, synthetic construct
  misc_feature 1..20: note = synthesized
  source 1..20: mol_type = other RNA
agattctgagcccctagaca

SEQ ID NO: 581 - RNA, 20 nt, synthetic construct
  misc_feature 1..20: note = synthesized
  source 1..20: mol_type = other RNA
agattctgagcccctagact

SEQ ID NO: 582 - RNA, 20 nt, synthetic construct
  misc_feature 1..20: note = synthesized
  source 1..20: mol_type = other RNA
agcccctagacacagtctca

SEQ ID NO: 583 - RNA, 20 nt, synthetic construct
  misc_feature 1..20: note = synthesized
  source 1..20: mol_type = other RNA
agcccctagactcagtctca

SEQ ID NO: 584 - RNA, 20 nt, synthetic construct
  misc_feature 1..20: note = synthesized
  source 1..20: mol_type = other RNA
agtctaggggctcagaatct

SEQ ID NO: 585 - RNA, 20 nt, synthetic construct
  misc_feature 1..20: note = synthesized
  source 1..20: mol_type = other RNA
agtgagactgagtctagggg

SEQ ID NO: 586 - RNA, 20 nt, synthetic construct
  misc_feature 1..20: note = synthesized
  source 1..20: mol_type = other RNA
agtgagactgtgtctagggg

SEQ ID NO: 587 - RNA, 20 nt, synthetic construct
  misc_feature 1..20: note = synthesized
  source 1..20: mol_type = other RNA
agtttgtcagtgagactgag

SEQ ID NO: 588 - RNA, 20 nt, synthetic construct
  misc_feature 1..20: note = synthesized
  source 1..20: mol_type = other RNA
agtttgtcagtgagactgtg

SEQ ID NO: 589 - RNA, 20 nt, synthetic construct
  misc_feature 1..20: note = synthesized
  source 1..20: mol_type = other RNA
attctgagcccctagacaca

SEQ ID NO: 590 - RNA, 20 nt, synthetic construct
  misc_feature 1..20: note = synthesized
  source 1..20: mol_type = other RNA
attctgagcccctagactca

SEQ ID NO: 591 - RNA, 20 nt, synthetic construct
  misc_feature 1..20: note = synthesized
  source 1..20: mol_type = other RNA
cacagtctcactgacaaact

SEQ ID NO: 592 - RNA, 20 nt, synthetic construct
  misc_feature 1..20: note = synthesized
  source 1..20: mol_type = other RNA
cagtgagactgagtctaggg

SEQ ID NO: 593 - RNA, 20 nt, synthetic construct
  misc_feature 1..20: note = synthesized
  source 1..20: mol_type = other RNA
cagtgagactgtgtctaggg

SEQ ID NO: 594 - RNA, 20 nt, synthetic construct
  misc_feature 1..20: note = synthesized
  source 1..20: mol_type = other RNA
cccctagacacagtctcact

SEQ ID NO: 595 - RNA, 20 nt, synthetic construct
  misc_feature 1..20: note = synthesized
  source 1..20: mol_type = other RNA
cccctagactcagtctcact

SEQ ID NO: 596 - RNA, 20 nt, synthetic construct
  misc_feature 1..20: note = synthesized
  source 1..20: mol_type = other RNA
ccctagacacagtctcactg

SEQ ID NO: 597 - RNA, 20 nt, synthetic construct
  misc_feature 1..20: note = synthesized
  source 1..20: mol_type = other RNA
ccctagactcagtctcactg

SEQ ID NO: 598 - RNA, 20 nt, synthetic construct
  misc_feature 1..20: note = synthesized
  source 1..20: mol_type = other RNA
cctagacacagtctcactga

SEQ ID NO: 599 - RNA, 20 nt, synthetic construct
  misc_feature 1..20: note = synthesized
  source 1..20: mol_type = other RNA
cctagactcagtctcactga

SEQ ID NO: 600 - RNA, 20 nt, synthetic construct
  misc_feature 1..20: note = synthesized
  source 1..20: mol_type = other RNA
ctagacacagtctcactgac

SEQ ID NO: 601 - RNA, 20 nt, synthetic construct
  misc_feature 1..20: note = synthesized
  source 1..20: mol_type = other RNA
ctagactcagtctcactgac

SEQ ID NO: 602 - RNA, 20 nt, synthetic construct
  misc_feature 1..20: note = synthesized
  source 1..20: mol_type = other RNA
ctcagtctcactgacaaact

SEQ ID NO: 603 - RNA, 20 nt, synthetic construct
  misc_feature 1..20: note = synthesized
  source 1..20: mol_type = other RNA
ctgagcccctagacacagtc

SEQ ID NO: 604 - RNA, 20 nt, synthetic construct
  misc_feature 1..20: note = synthesized
  source 1..20: mol_type = other RNA
ctgagcccctagactcagtc

SEQ ID NO: 605 - RNA, 20 nt, synthetic construct
  misc_feature 1..20: note = synthesized
  source 1..20: mol_type = other RNA
gacacagtctcactgacaaa

SEQ ID NO: 606 - RNA, 20 nt, synthetic construct
  misc_feature 1..20: note = synthesized
  source 1..20: mol_type = other RNA
gactcagtctcactgacaaa

SEQ ID NO: 607 - RNA, 20 nt, synthetic construct
  misc_feature 1..20: note = synthesized
  source 1..20: mol_type = other RNA
gactgagtctaggggctcag

SEQ ID NO: 608 - RNA, 20 nt, synthetic construct
  misc_feature 1..20: note = synthesized
  source 1..20: mol_type = other RNA
gactgtgtctaggggctcag

SEQ ID NO: 609 - RNA, 20 nt, synthetic construct
  misc_feature 1..20: note = synthesized
  source 1..20: mol_type = other RNA
gagtttgtcagtgagactga

SEQ ID NO: 610 - RNA, 20 nt, synthetic construct
  misc_feature 1..20: note = synthesized
  source 1..20: mol_type = other RNA
gagtttgtcagtgagactgt

SEQ ID NO: 611 - RNA, 20 nt, synthetic construct
  misc_feature 1..20: note = synthesized
  source 1..20: mol_type = other RNA
gattctgagcccctagacac

SEQ ID NO: 612 - RNA, 20 nt, synthetic construct
  misc_feature 1..20: note = synthesized
  source 1..20: mol_type = other RNA
gattctgagcccctagactc

SEQ ID NO: 613 - RNA, 20 nt, synthetic construct
  misc_feature 1..20: note = synthesized
  source 1..20: mol_type = other RNA
gtgagactgagtctaggggc

SEQ ID NO: 614 - RNA, 20 nt, synthetic construct
  misc_feature 1..20: note = synthesized
  source 1..20: mol_type = other RNA
gtgagactgtgtctaggggc

SEQ ID NO: 615 - RNA, 20 nt, synthetic construct
  misc_feature 1..20: note = synthesized
  source 1..20: mol_type = other RNA
gtttgtcagtgagactgagt

SEQ ID NO: 616 - RNA, 20 nt, synthetic construct
  misc_feature 1..20: note = synthesized
  source 1..20: mol_type = other RNA
gtttgtcagtgagactgtgt

SEQ ID NO: 617 - RNA, 20 nt, synthetic construct
  misc_feature 1..20: note = synthesized
  source 1..20: mol_type = other RNA
tagacacagtctcactgaca

SEQ ID NO: 618 - RNA, 20 nt, synthetic construct
  misc_feature 1..20: note = synthesized
  source 1..20: mol_type = other RNA
tagactcagtctcactgaca

SEQ ID NO: 619 - RNA, 20 nt, synthetic construct
  misc_feature 1..20: note = synthesized
  source 1..20: mol_type = other RNA
tcagtctcactgacaaactc

SEQ ID NO: 620 - RNA, 20 nt, synthetic construct
  misc_feature 1..20: note = synthesized
  source 1..20: mol_type = other RNA
tcagtgagactgagtctagg

SEQ ID NO: 621 - RNA, 20 nt, synthetic construct
  misc_feature 1..20: note = synthesized
  source 1..20: mol_type = other RNA
tcagtgagactgtgtctagg

SEQ ID NO: 622 - RNA, 20 nt, synthetic construct
  misc_feature 1..20: note = synthesized
  source 1..20: mol_type = other RNA
tctgagcccctagacacagt

SEQ ID NO: 623 - RNA, 20 nt, synthetic construct
  misc_feature 1..20: note = synthesized
  source 1..20: mol_type = other RNA
tctgagcccctagactcagt

SEQ ID NO: 624 - RNA, 20 nt, synthetic construct
  misc_feature 1..20: note = synthesized
  source 1..20: mol_type = other RNA
tgagcccctagacacagtct

SEQ ID NO: 625 - RNA, 20 nt, synthetic construct
  misc_feature 1..20: note = synthesized
  source 1..20: mol_type = other RNA
tgagcccctagactcagtct

SEQ ID NO: 626 - RNA, 20 nt, synthetic construct
  misc_feature 1..20: note = synthesized
  source 1..20: mol_type = other RNA
tgagtctaggggctcagaat

SEQ ID NO: 627 - RNA, 20 nt, synthetic construct
  misc_feature 1..20: note = synthesized
  source 1..20: mol_type = other RNA
tgtctaggggctcagaatct

SEQ ID NO: 628 - RNA, 20 nt, synthetic construct
  misc_feature 1..20: note = synthesized
  source 1..20: mol_type = other RNA
tgtgtctaggggctcagaat

SEQ ID NO: 629 - RNA, 20 nt, synthetic construct
  misc_feature 1..20: note = synthesized
  source 1..20: mol_type = other RNA
ttctgagcccctagacacag

SEQ ID NO: 630 - RNA, 20 nt, synthetic construct
  misc_feature 1..20: note = synthesized
  source 1..20: mol_type = other RNA
ttctgagcccctagactcag

SEQ ID NO: 631 - RNA, 20 nt, synthetic construct
  misc_feature 1..20: note = synthesized
  source 1..20: mol_type = other RNA
tttgtcagtgagactgagtc

SEQ ID NO: 632 - RNA, 20 nt, synthetic construct
  misc_feature 1..20: note = synthesized
  source 1..20: mol_type = other RNA
tttgtcagtgagactgtgtc

SEQ ID NO: 633 - RNA, 20 nt, synthetic construct
  misc_feature 1..20: note = synthesized
  source 1..20: mol_type = other RNA
aaaaagatagatatatcaaa

SEQ ID NO: 634 - RNA, 20 nt, synthetic construct
  misc_feature 1..20: note = synthesized
  source 1..20: mol_type = other RNA
aaaagatagatatatcaaac

SEQ ID NO: 635 - RNA, 20 nt, synthetic construct
  misc_feature 1..20: note = synthesized
  source 1..20: mol_type = other RNA
aaaagcatgtgacaataagc

SEQ ID NO: 636 - RNA, 20 nt, synthetic construct
  misc_feature 1..20: note = synthesized
  source 1..20: mol_type = other RNA
aaaagcatgtgacaataagg

SEQ ID NO: 637 - RNA, 20 nt, synthetic construct
  misc_feature 1..20: note = synthesized
  source 1..20: mol_type = other RNA
aaaaggatagatatatcaaa

SEQ ID NO: 638 - RNA, 20 nt, synthetic construct
  misc_feature 1..20: note = synthesized
  source 1..20: mol_type = other RNA
aaagatacccttattgtcac

SEQ ID NO: 639 - RNA, 20 nt, synthetic construct
  misc_feature 1..20: note = synthesized
  source 1..20: mol_type = other RNA
aaagatacgcttattgtcac

SEQ ID NO: 640 - RNA, 20 nt, synthetic construct
  misc_feature 1..20: note = synthesized
  source 1..20: mol_type = other RNA
aaagatagatatatcaaaca

SEQ ID NO: 641 - RNA, 20 nt, synthetic construct
  misc_feature 1..20: note = synthesized
  source 1..20: mol_type = other RNA
aaagcatgtgacaataagcg

SEQ ID NO: 642 - RNA, 20 nt, synthetic construct
  misc_feature 1..20: note = synthesized
  source 1..20: mol_type = other RNA
aaagcatgtgacaataaggg

SEQ ID NO: 643 - RNA, 20 nt, synthetic construct
  misc_feature 1..20: note = synthesized
  source 1..20: mol_type = other RNA
aaaggatagatatatcaaac

SEQ ID NO: 644 - RNA, 20 nt, synthetic construct
  misc_feature 1..20: note = synthesized
  source 1..20: mol_type = other RNA
aacttcaaaaagatagatat

SEQ ID NO: 645 - RNA, 20 nt, synthetic construct
  misc_feature 1..20: note = synthesized
  source 1..20: mol_type = other RNA
aacttcaaaaggatagatat

SEQ ID NO: 646 - RNA, 20 nt, synthetic construct
  misc_feature 1..20: note = synthesized
  source 1..20: mol_type = other RNA
aagacaaatactgcttagct

SEQ ID NO: 647 - RNA, 20 nt, synthetic construct
  misc_feature 1..20: note = synthesized
  source 1..20: mol_type = other RNA
aagatacccttattgtcaca

SEQ ID NO: 648 - RNA, 20 nt, synthetic construct
  misc_feature 1..20: note = synthesized
  source 1..20: mol_type = other RNA
aagatacgcttattgtcaca

SEQ ID NO: 649 - RNA, 20 nt, synthetic construct
  misc_feature 1..20: note = synthesized
  source 1..20: mol_type = other RNA
aagatagatatatcaaacat

SEQ ID NO: 650 - RNA, 20 nt, synthetic construct
  misc_feature 1..20: note = synthesized
  source 1..20: mol_type = other RNA
aagcagtatttgtctgtcta

SEQ ID NO: 651 - RNA, 20 nt, synthetic construct
  misc_feature 1..20: note = synthesized
  source 1..20: mol_type = other RNA
aagcagtatttgtctttcta

SEQ ID NO: 652 - RNA, 20 nt, synthetic construct
  misc_feature 1..20: note = synthesized
  source 1..20: mol_type = other RNA
aagcatgtgacaataagcgt

SEQ ID NO: 653 - RNA, 20 nt, synthetic construct
  misc_feature 1..20: note = synthesized
  source 1..20: mol_type = other RNA
aagcatgtgacaataagggt

SEQ ID NO: 654 - RNA, 20 nt, synthetic construct
  misc_feature 1..20: note = synthesized
  source 1..20: mol_type = other RNA
aagcgtatctttaaatgtgc

SEQ ID NO: 655 - RNA, 20 nt, synthetic construct
  misc_feature 1..20: note = synthesized
  source 1..20: mol_type = other RNA
aaggatagatatatcaaaca

SEQ ID NO: 656 - RNA, 20 nt, synthetic construct
  misc_feature 1..20: note = synthesized
  source 1..20: mol_type = other RNA
aagggtatctttaaatgtgc

SEQ ID NO: 657 - RNA, 20 nt, synthetic construct
  misc_feature 1..20: note = synthesized
  source 1..20: mol_type = other RNA
aataagcgtatctttaaatg

SEQ ID NO: 658 - RNA, 20 nt, synthetic construct
  misc_feature 1..20: note = synthesized
  source 1..20: mol_type = other RNA
aataagggtatctttaaatg

SEQ ID NO: 659 - RNA, 20 nt, synthetic construct
  misc_feature 1..20: note = synthesized
  source 1..20: mol_type = other RNA
aatgagcagatatagaaaga

SEQ ID NO: 660 - RNA, 20 nt, synthetic construct
  misc_feature 1..20: note = synthesized
  source 1..20: mol_type = other RNA
aatgagcagatatagacaga

SEQ ID NO: 661 - RNA, 20 nt, synthetic construct
  misc_feature 1..20: note = synthesized
  source 1..20: mol_type = other RNA
acattaacttcaaaaagata

SEQ ID NO: 662 - RNA, 20 nt, synthetic construct
  misc_feature 1..20: note = synthesized
  source 1..20: mol_type = other RNA
acattaacttcaaaaggata

SEQ ID NO: 663 - RNA, 20 nt, synthetic construct
  misc_feature 1..20: note = synthesized
  source 1..20: mol_type = other RNA
acccttattgtcacatgctt

SEQ ID NO: 664 - RNA, 20 nt, synthetic construct
  misc_feature 1..20: note = synthesized
  source 1..20: mol_type = other RNA
acgcttattgtcacatgctt

SEQ ID NO: 665 - RNA, 20 nt, synthetic construct
  misc_feature 1..20: note = synthesized
  source 1..20: mol_type = other RNA
agatacccttattgtcacat

SEQ ID NO: 666 - RNA, 20 nt, synthetic construct
  misc_feature 1..20: note = synthesized
  source 1..20: mol_type = other RNA
agatacgcttattgtcacat

SEQ ID NO: 667 - RNA, 20 nt, synthetic construct
  misc_feature 1..20: note = synthesized
  source 1..20: mol_type = other RNA
agatagatatatcaaacatc

SEQ ID NO: 668 - RNA, 20 nt, synthetic construct
  misc_feature 1..20: note = synthesized
  source 1..20: mol_type = other RNA
agatatagaaagacaaatac

SEQ ID NO: 669 - RNA, 20 nt, synthetic construct
  misc_feature 1..20: note = synthesized
  source 1..20: mol_type = other RNA
agatatagacagacaaatac

SEQ ID NO: 670 - RNA, 20 nt, synthetic construct
  misc_feature 1..20: note = synthesized
  source 1..20: mol_type = other RNA
agcagatatagaaagacaaa

SEQ ID NO: 671 - RNA, 20 nt, synthetic construct
  misc_feature 1..20: note = synthesized
  source 1..20: mol_type = other RNA
agcagatatagacagacaaa

SEQ ID NO: 672 - RNA, 20 nt, synthetic construct
  misc_feature 1..20: note = synthesized
  source 1..20: mol_type = other RNA
agcagtatttgtctgtctat

SEQ ID NO: 673 - RNA, 20 nt, synthetic construct
  misc_feature 1..20: note = synthesized
  source 1..20: mol_type = other RNA
agcagtatttgtctttctat

SEQ ID NO: 674 - RNA, 20 nt, synthetic construct
  misc_feature 1..20: note = synthesized
  source 1..20: mol_type = other RNA
agcatgtgacaataagcgta

SEQ ID NO: 675 - RNA, 20 nt, synthetic construct
  misc_feature 1..20: note = synthesized
  source 1..20: mol_type = other RNA
agcatgtgacaataagggta

SEQ ID NO: 676 - RNA, 20 nt, synthetic construct
  misc_feature 1..20: note = synthesized
  source 1..20: mol_type = other RNA
agcgtatctttaaatgtgca

SEQ ID NO: 677 - RNA, 20 nt, synthetic construct
  misc_feature 1..20: note = synthesized
  source 1..20: mol_type = other RNA
agctaagcagtatttgtctg

SEQ ID NO: 678 - RNA, 20 nt, synthetic construct
  misc_feature 1..20: note = synthesized
  source 1..20: mol_type = other RNA
agctaagcagtatttgtctt

SEQ ID NO: 679 - RNA, 20 nt, synthetic construct
  misc_feature 1..20: note = synthesized
  source 1..20: mol_type = other RNA
aggatagatatatcaaacat

SEQ ID NO: 680 - RNA, 20 nt, synthetic construct
  misc_feature 1..20: note = synthesized
  source 1..20: mol_type = other RNA
agggtatctttaaatgtgca

SEQ ID NO: 681 - RNA, 20 nt, synthetic construct
  misc_feature 1..20: note = synthesized
  source 1..20: mol_type = other RNA
agtatttgtctgtctatatc

SEQ ID NO: 682 - RNA, 20 nt, synthetic construct
  misc_feature 1..20: note = synthesized
  source 1..20: mol_type = other RNA
agtatttgtctttctatatc

SEQ ID NO: 683 - RNA, 20 nt, synthetic construct
  misc_feature 1..20: note = synthesized
  source 1..20: mol_type = other RNA
ataagcgtatctttaaatgt

SEQ ID NO: 684 - RNA, 20 nt, synthetic construct
  misc_feature 1..20: note = synthesized
  source 1..20: mol_type = other RNA
ataagggtatctttaaatgt

SEQ ID NO: 685 - RNA, 20 nt, synthetic construct
  misc_feature 1..20: note = synthesized
  source 1..20: mol_type = other RNA
atacccttattgtcacatgc

SEQ ID NO: 686 - RNA, 20 nt, synthetic construct
  misc_feature 1..20: note = synthesized
  source 1..20: mol_type = other RNA
atacgcttattgtcacatgc

SEQ ID NO: 687 - RNA, 20 nt, synthetic construct
  misc_feature 1..20: note = synthesized
  source 1..20: mol_type = other RNA
atagaaagacaaatactgct

SEQ ID NO: 688 - RNA, 20 nt, synthetic construct
  misc_feature 1..20: note = synthesized
  source 1..20: mol_type = other RNA
atagacagacaaatactgct

SEQ ID NO: 689 - RNA, 20 nt, synthetic construct
  misc_feature 1..20: note = synthesized
  source 1..20: mol_type = other RNA
atatagaaagacaaatactg

SEQ ID NO: 690 - RNA, 20 nt, synthetic construct
  misc_feature 1..20: note = synthesized
  source 1..20: mol_type = other RNA
atatagacagacaaatactg

SEQ ID NO: 691 - RNA, 20 nt, synthetic construct
  misc_feature 1..20: note = synthesized
  source 1..20: mol_type = other RNA
atatatctatccttttgaag

SEQ ID NO: 692 - RNA, 20 nt, synthetic construct
  misc_feature 1..20: note = synthesized
  source 1..20: mol_type = other RNA
atatatctatctttttgaag

SEQ ID NO: 693 - RNA, 20 nt, synthetic construct
  misc_feature 1..20: note = synthesized
  source 1..20: mol_type = other RNA
atatctatccttttgaagtt

SEQ ID NO: 694 - RNA, 20 nt, synthetic construct
  misc_feature 1..20: note = synthesized
  source 1..20: mol_type = other RNA
atatctatctttttgaagtt

SEQ ID NO: 695 - RNA, 20 nt, synthetic construct
  misc_feature 1..20: note = synthesized
  source 1..20: mol_type = other RNA
atccttttgaagttaatgta

SEQ ID NO: 696 - RNA, 20 nt, synthetic construct
  misc_feature 1..20: note = synthesized
  source 1..20: mol_type = other RNA
atctttttgaagttaatgta

SEQ ID NO: 697 - RNA, 20 nt, synthetic construct
  misc_feature 1..20: note = synthesized
  source 1..20: mol_type = other RNA
atgagcagatatagaaagac

SEQ ID NO: 698 - RNA, 20 nt, synthetic construct
  misc_feature 1..20: note = synthesized
  source 1..20: mol_type = other RNA
atgagcagatatagacagac

SEQ ID NO: 699 - RNA, 20 nt, synthetic construct
  misc_feature 1..20: note = synthesized
  source 1..20: mol_type = other RNA
atgtgacaataagcgtatct

SEQ ID NO: 700 - RNA, 20 nt, synthetic construct
  misc_feature 1..20: note = synthesized
  source 1..20: mol_type = other RNA
atgtgacaataagggtatct

SEQ ID NO: 701 - RNA, 20 nt, synthetic construct
  misc_feature 1..20: note = synthesized
  source 1..20: mol_type = other RNA
atgtttgatatatctatcct

SEQ ID NO: 702 - RNA, 20 nt, synthetic construct
  misc_feature 1..20: note = synthesized
  source 1..20: mol_type = other RNA
atgtttgatatatctatctt

SEQ ID NO: 703 - RNA, 20 nt, synthetic construct
  misc_feature 1..20: note = synthesized
  source 1..20: mol_type = other RNA
attaacttcaaaaagataga

SEQ ID NO: 704 - RNA, 20 nt, synthetic construct
  misc_feature 1..20: note = synthesized
  source 1..20: mol_type = other RNA
attaacttcaaaaggataga

SEQ ID NO: 705 - RNA, 20 nt, synthetic construct
  misc_feature 1..20: note = synthesized
  source 1..20: mol_type = other RNA
atttaaagatacccttattg

SEQ ID NO: 706 - RNA, 20 nt, synthetic construct
  misc_feature 1..20: note = synthesized
  source 1..20: mol_type = other RNA
atttaaagatacgcttattg

SEQ ID NO: 707 - RNA, 20 nt, synthetic construct
  misc_feature 1..20: note = synthesized
  source 1..20: mol_type = other RNA
atttgtctgtctatatctgc

SEQ ID NO: 708 - RNA, 20 nt, synthetic construct
  misc_feature 1..20: note = synthesized
  source 1..20: mol_type = other RNA
atttgtctttctatatctgc

SEQ ID NO: 709 - RNA, 20 nt, synthetic construct
  misc_feature 1..20: note = synthesized
  source 1..20: mol_type = other RNA
caaaaagatagatatatcaa

SEQ ID NO: 710 - RNA, 20 nt, synthetic construct
  misc_feature 1..20: note = synthesized
  source 1..20: mol_type = other RNA
caaaaggatagatatatcaa

SEQ ID NO: 711 - RNA, 20 nt, synthetic construct
  misc_feature 1..20: note = synthesized
  source 1..20: mol_type = other RNA
caataagcgtatctttaaat

SEQ ID NO: 712 - RNA, 20 nt, synthetic construct
  misc_feature 1..20: note = synthesized
  source 1..20: mol_type = other RNA
caataagggtatctttaaat

SEQ ID NO: 713 - RNA, 20 nt, synthetic construct
  misc_feature 1..20: note = synthesized
  source 1..20: mol_type = other RNA
cacatttaaagataccctta

SEQ ID NO: 714 - RNA, 20 nt, synthetic construct
  misc_feature 1..20: note = synthesized
  source 1..20: mol_type = other RNA
cacatttaaagatacgctta

SEQ ID NO: 715 - RNA, 20 nt, synthetic construct
  misc_feature 1..20: note = synthesized
  source 1..20: mol_type = other RNA
cagacaaatactgcttagct

SEQ ID NO: 716 - RNA, 20 nt, synthetic construct
  misc_feature 1..20: note = synthesized
  source 1..20: mol_type = other RNA
cagatatagaaagacaaata

SEQ ID NO: 717 - RNA, 20 nt, synthetic construct
  misc_feature 1..20: note = synthesized
  source 1..20: mol_type = other RNA
cagatatagacagacaaata

SEQ ID NO: 718 - RNA, 20 nt, synthetic construct
  misc_feature 1..20: note = synthesized
  source 1..20: mol_type = other RNA
cagtatttgtctgtctatat

SEQ ID NO: 719 - RNA, 20 nt, synthetic construct
  misc_feature 1..20: note = synthesized
  source 1..20: mol_type = other RNA
cagtatttgtctttctatat

SEQ ID NO: 720 - RNA, 20 nt, synthetic construct
  misc_feature 1..20: note = synthesized
  source 1..20: mol_type = other RNA
catgtgacaataagcgtatc

SEQ ID NO: 721 - RNA, 20 nt, synthetic construct
  misc_feature 1..20: note = synthesized
  source 1..20: mol_type = other RNA
catgtgacaataagggtatc

SEQ ID NO: 722 - RNA, 20 nt, synthetic construct
  misc_feature 1..20: note = synthesized
  source 1..20: mol_type = other RNA
cattaacttcaaaaagatag

SEQ ID NO: 723 - RNA, 20 nt, synthetic construct
  misc_feature 1..20: note = synthesized
  source 1..20: mol_type = other RNA
cattaacttcaaaaggatag

SEQ ID NO: 724 - RNA, 20 nt, synthetic construct
  misc_feature 1..20: note = synthesized
  source 1..20: mol_type = other RNA
catttaaagatacccttatt

SEQ ID NO: 725 - RNA, 20 nt, synthetic construct
  misc_feature 1..20: note = synthesized
  source 1..20: mol_type = other RNA
catttaaagatacgcttatt

SEQ ID NO: 726 - RNA, 20 nt, synthetic construct
  misc_feature 1..20: note = synthesized
  source 1..20: mol_type = other RNA
cccttattgtcacatgcttt

SEQ ID NO: 727 - RNA, 20 nt, synthetic construct
  misc_feature 1..20: note = synthesized
  source 1..20: mol_type = other RNA
ccttattgtcacatgctttt

SEQ ID NO: 728 - RNA, 20 nt, synthetic construct
  misc_feature 1..20: note = synthesized
  source 1..20: mol_type = other RNA
cgcttattgtcacatgcttt

SEQ ID NO: 729 - RNA, 20 nt, synthetic construct
  misc_feature 1..20: note = synthesized
  source 1..20: mol_type = other RNA
cgtatctttaaatgtgcaaa

SEQ ID NO: 730 - RNA, 20 nt, synthetic construct
  misc_feature 1..20: note = synthesized
  source 1..20: mol_type = other RNA
ctaagcagtatttgtctgtc

SEQ ID NO: 731 - RNA, 20 nt, synthetic construct
  misc_feature 1..20: note = synthesized
  source 1..20: mol_type = other RNA
ctaagcagtatttgtctttc

SEQ ID NO: 732 - RNA, 20 nt, synthetic construct
  misc_feature 1..20: note = synthesized
  source 1..20: mol_type = other RNA
ctatccttttgaagttaatg

SEQ ID NO: 733 - RNA, 20 nt, synthetic construct
  misc_feature 1..20: note = synthesized
  source 1..20: mol_type = other RNA
ctatctttttgaagttaatg

SEQ ID NO: 734 - RNA, 20 nt, synthetic construct
  misc_feature 1..20: note = synthesized
  source 1..20: mol_type = other RNA
ctgtctatatctgctcattt

SEQ ID NO: 735 - RNA, 20 nt, synthetic construct
  misc_feature 1..20: note = synthesized
  source 1..20: mol_type = other RNA
cttcaaaaagatagatatat

SEQ ID NO: 736 - RNA, 20 nt, synthetic construct
  misc_feature 1..20: note = synthesized
  source 1..20: mol_type = other RNA
cttcaaaaggatagatatat

SEQ ID NO: 737 - RNA, 20 nt, synthetic construct
  misc_feature 1..20: note = synthesized
  source 1..20: mol_type = other RNA
ctttctatatctgctcattt

SEQ ID NO: 738 - RNA, 20 nt, synthetic construct
  misc_feature 1..20: note = synthesized
  source 1..20: mol_type = other RNA
cttttgaagttaatgtaata

SEQ ID NO: 739 - RNA, 20 nt, synthetic construct
  misc_feature 1..20: note = synthesized
  source 1..20: mol_type = other RNA
gaaagacaaatactgcttag

SEQ ID NO: 740 - RNA, 20 nt, synthetic construct
  misc_feature 1..20: note = synthesized
  source 1..20: mol_type = other RNA
gaaatgagcagatatagaaa

SEQ ID NO: 741 - RNA, 20 nt, synthetic construct
  misc_feature 1..20: note = synthesized
  source 1..20: mol_type = other RNA
gaaatgagcagatatagaca

SEQ ID NO: 742 - RNA, 20 nt, synthetic construct
  misc_feature 1..20: note = synthesized
  source 1..20: mol_type = other RNA
gacaataagcgtatctttaa

SEQ ID NO: 743 - RNA, 20 nt, synthetic construct
  misc_feature 1..20: note = synthesized
  source 1..20: mol_type = other RNA
gacaataagggtatctttaa

SEQ ID NO: 744 - RNA, 20 nt, synthetic construct
  misc_feature 1..20: note = synthesized
  source 1..20: mol_type = other RNA
gacagacaaatactgcttag

SEQ ID NO: 745 - RNA, 20 nt, synthetic construct
  misc_feature 1..20: note = synthesized
  source 1..20: mol_type = other RNA
gagcagatatagaaagacaa

SEQ ID NO: 746 - RNA, 20 nt, synthetic construct
  misc_feature 1..20: note = synthesized
  source 1..20: mol_type = other RNA
gagcagatatagacagacaa

SEQ ID NO: 747 - RNA, 20 nt, synthetic construct
  misc_feature 1..20: note = synthesized
  source 1..20: mol_type = other RNA
gatacccttattgtcacatg

SEQ ID NO: 748 - RNA, 20 nt, synthetic construct
  misc_feature 1..20: note = synthesized
  source 1..20: mol_type = other RNA
gatacgcttattgtcacatg

SEQ ID NO: 749 - RNA, 20 nt, synthetic construct
  misc_feature 1..20: note = synthesized
  source 1..20: mol_type = other RNA
gatatagaaagacaaatact

SEQ ID NO: 750 - RNA, 20 nt, synthetic construct
  misc_feature 1..20: note = synthesized
  source 1..20: mol_type = other RNA
gatatagacagacaaatact

SEQ ID NO: 751 - RNA, 20 nt, synthetic construct
  misc_feature 1..20: note = synthesized
  source 1..20: mol_type = other RNA
gatatatctatccttttgaa

SEQ ID NO: 752 - RNA, 20 nt, synthetic construct
  misc_feature 1..20: note = synthesized
  source 1..20: mol_type = other RNA
gatatatctatctttttgaa

SEQ ID NO: 753 - RNA, 20 nt, synthetic construct
  misc_feature 1..20: note = synthesized
  source 1..20: mol_type = other RNA
gatgtttgatatatctatcc

SEQ ID NO: 754 - RNA, 20 nt, synthetic construct
  misc_feature 1..20: note = synthesized
  source 1..20: mol_type = other RNA
gatgtttgatatatctatct

SEQ ID NO: 755 - RNA, 20 nt, synthetic construct
  misc_feature 1..20: note = synthesized
  source 1..20: mol_type = other RNA
gcacatttaaagataccctt

SEQ ID NO: 756 - RNA, 20 nt, synthetic construct
  misc_feature 1..20: note = synthesized
  source 1..20: mol_type = other RNA
gcacatttaaagatacgctt

SEQ ID NO: 757 - RNA, 20 nt, synthetic construct
  misc_feature 1..20: note = synthesized
  source 1..20: mol_type = other RNA
gcagatatagaaagacaaat

SEQ ID NO: 758 - RNA, 20 nt, synthetic construct
  misc_feature 1..20: note = synthesized
  source 1..20: mol_type = other RNA
gcagatatagacagacaaat

SEQ ID NO: 759 - RNA, 20 nt, synthetic construct
  misc_feature 1..20: note = synthesized
  source 1..20: mol_type = other RNA
gcagtatttgtctgtctata

SEQ ID NO: 760 - RNA, 20 nt, synthetic construct
  misc_feature 1..20: note = synthesized
  source 1..20: mol_type = other RNA
gcagtatttgtctttctata

SEQ ID NO: 761 - RNA, 20 nt, synthetic construct
  misc_feature 1..20: note = synthesized
  source 1..20: mol_type = other RNA
gcatgtgacaataagcgtat

SEQ ID NO: 762 - RNA, 20 nt, synthetic construct
  misc_feature 1..20: note = synthesized
  source 1..20: mol_type = other RNA
gcatgtgacaataagggtat

SEQ ID NO: 763 - RNA, 20 nt, synthetic construct
  misc_feature 1..20: note = synthesized
  source 1..20: mol_type = other RNA
gcgtatctttaaatgtgcaa

SEQ ID NO: 764 - RNA, 20 nt, synthetic construct
  misc_feature 1..20: note = synthesized
  source 1..20: mol_type = other RNA
gctaagcagtatttgtctgt

SEQ ID NO: 765 - RNA, 20 nt, synthetic construct
  misc_feature 1..20: note = synthesized
  source 1..20: mol_type = other RNA
gctaagcagtatttgtcttt

SEQ ID NO: 766 - RNA, 20 nt, synthetic construct
  misc_feature 1..20: note = synthesized
  source 1..20: mol_type = other RNA
gcttattgtcacatgctttt

SEQ ID NO: 767 - RNA, 20 nt, synthetic construct
  misc_feature 1..20: note = synthesized
  source 1..20: mol_type = other RNA
ggatagatatatcaaacatc

SEQ ID NO: 768 - RNA, 20 nt, synthetic construct
  misc_feature 1..20: note = synthesized
  source 1..20: mol_type = other RNA
gggtatctttaaatgtgcaa

SEQ ID NO: 769 - RNA, 20 nt, synthetic construct
  misc_feature 1..20: note = synthesized
  source 1..20: mol_type = other RNA
ggtatctttaaatgtgcaaa

SEQ ID NO: 770 - RNA, 20 nt, synthetic construct
  misc_feature 1..20: note = synthesized
  source 1..20: mol_type = other RNA
gtatttgtctgtctatatct

SEQ ID NO: 771 - RNA, 20 nt, synthetic construct
  misc_feature 1..20: note = synthesized
  source 1..20: mol_type = other RNA
gtatttgtctttctatatct

SEQ ID NO: 772 - RNA, 20 nt, synthetic construct
  misc_feature 1..20: note = synthesized
  source 1..20: mol_type = other RNA
gtctatatctgctcatttca

SEQ ID NO: 773 - RNA, 20 nt, synthetic construct
  misc_feature 1..20: note = synthesized
  source 1..20: mol_type = other RNA
gtctgtctatatctgctcat

SEQ ID NO: 774 - RNA, 20 nt, synthetic construct
  misc_feature 1..20: note = synthesized
  source 1..20: mol_type = other RNA
gtctttctatatctgctcat

SEQ ID NO: 775 - RNA, 20 nt, synthetic construct
  misc_feature 1..20: note = synthesized
  source 1..20: mol_type = other RNA
gtgacaataagcgtatcttt

SEQ ID NO: 776 - RNA, 20 nt, synthetic construct
  misc_feature 1..20: note = synthesized
  source 1..20: mol_type = other RNA
gtgacaataagggtatcttt

SEQ ID NO: 777 - RNA, 20 nt, synthetic construct
  misc_feature 1..20: note = synthesized
  source 1..20: mol_type = other RNA
taaagatacccttattgtca

SEQ ID NO: 778 - RNA, 20 nt, synthetic construct
  misc_feature 1..20: note = synthesized
  source 1..20: mol_type = other RNA
taaagatacgcttattgtca

SEQ ID NO: 779 - RNA, 20 nt, synthetic construct
  misc_feature 1..20: note = synthesized
  source 1..20: mol_type = other RNA
taacttcaaaaagatagata

SEQ ID NO: 780 - RNA, 20 nt, synthetic construct
  misc_feature 1..20: note = synthesized
  source 1..20: mol_type = other RNA
taacttcaaaaggatagata

SEQ ID NO: 781 - RNA, 20 nt, synthetic construct
  misc_feature 1..20: note = synthesized
  source 1..20: mol_type = other RNA
taagcagtatttgtctgtct

SEQ ID NO: 782 - RNA, 20 nt, synthetic construct
  misc_feature 1..20: note = synthesized
  source 1..20: mol_type = other RNA
taagcagtatttgtctttct

SEQ ID NO: 783 - RNA, 20 nt, synthetic construct
  misc_feature 1..20: note = synthesized
  source 1..20: mol_type = other RNA
taagcgtatctttaaatgtg

SEQ ID NO: 784 - RNA, 20 nt, synthetic construct
  misc_feature 1..20: note = synthesized
  source 1..20: mol_type = other RNA
taagggtatctttaaatgtg

SEQ ID NO: 785 - RNA, 20 nt, synthetic construct
  misc_feature 1..20: note = synthesized
  source 1..20: mol_type = other RNA
tacccttattgtcacatgct

SEQ ID NO: 786 - RNA, 20 nt, synthetic construct
  misc_feature 1..20: note = synthesized
  source 1..20: mol_type = other RNA
tacgcttattgtcacatgct

SEQ ID NO: 787 - RNA, 20 nt, synthetic construct
  misc_feature 1..20: note = synthesized
  source 1..20: mol_type = other RNA
tagaaagacaaatactgctt

SEQ ID NO: 788 - RNA, 20 nt, synthetic construct
  misc_feature 1..20: note = synthesized
  source 1..20: mol_type = other RNA
tagacagacaaatactgctt

SEQ ID NO: 789 - RNA, 20 nt, synthetic construct
  misc_feature 1..20: note = synthesized
  source 1..20: mol_type = other RNA
tatagaaagacaaatactgc

SEQ ID NO: 790 - RNA, 20 nt, synthetic construct
  misc_feature 1..20: note = synthesized
  source 1..20: mol_type = other RNA
tatagacagacaaatactgc

SEQ ID NO: 791 - RNA, 20 nt, synthetic construct
  misc_feature 1..20: note = synthesized
  source 1..20: mol_type = other RNA
tatatctatccttttgaagt

SEQ ID NO: 792 - RNA, 20 nt, synthetic construct
  misc_feature 1..20: note = synthesized
  source 1..20: mol_type = other RNA
tatatctatctttttgaagt

SEQ ID NO: 793 - RNA, 20 nt, synthetic construct
  misc_feature 1..20: note = synthesized
  source 1..20: mol_type = other RNA
tatccttttgaagttaatgt

SEQ ID NO: 794 - RNA, 20 nt, synthetic construct
  misc_feature 1..20: note = synthesized
  source 1..20: mol_type = other RNA
tatctatccttttgaagtta

SEQ ID NO: 795 - RNA, 20 nt, synthetic construct
  misc_feature 1..20: note = synthesized
  source 1..20: mol_type = other RNA
tatctatctttttgaagtta

SEQ ID NO: 796 - RNA, 20 nt, synthetic construct
  misc_feature 1..20: note = synthesized
  source 1..20: mol_type = other RNA
tatctttttgaagttaatgt

SEQ ID NO: 797 - RNA, 20 nt, synthetic construct
  misc_feature 1..20: note = synthesized
  source 1..20: mol_type = other RNA
tattacattaacttcaaaaa

SEQ ID NO: 798 - RNA, 20 nt, synthetic construct
  misc_feature 1..20: note = synthesized
  source 1..20: mol_type = other RNA
tattacattaacttcaaaag

SEQ ID NO: 799 - RNA, 20 nt, synthetic construct
  misc_feature 1..20: note = synthesized
  source 1..20: mol_type = other RNA
tatttgtctgtctatatctg

SEQ ID NO: 800 - RNA, 20 nt, synthetic construct
  misc_feature 1..20: note = synthesized
  source 1..20: mol_type = other RNA
tatttgtctttctatatctg

SEQ ID NO: 801 - RNA, 20 nt, synthetic construct
  misc_feature 1..20: note = synthesized
  source 1..20: mol_type = other RNA
tcaaaaagatagatatatca

SEQ ID NO: 802 - RNA, 20 nt, synthetic construct
  misc_feature 1..20: note = synthesized
  source 1..20: mol_type = other RNA
tcaaaaggatagatatatca

SEQ ID NO: 803 - RNA, 20 nt, synthetic construct
  misc_feature 1..20: note = synthesized
  source 1..20: mol_type = other RNA
tccttttgaagttaatgtaa

SEQ ID NO: 804 - RNA, 20 nt, synthetic construct
  misc_feature 1..20: note = synthesized
  source 1..20: mol_type = other RNA
tctatccttttgaagttaat

SEQ ID NO: 805 - RNA, 20 nt, synthetic construct
  misc_feature 1..20: note = synthesized
  source 1..20: mol_type = other RNA
tctatctttttgaagttaat

SEQ ID NO: 806 - RNA, 20 nt, synthetic construct
  misc_feature 1..20: note = synthesized
  source 1..20: mol_type = other RNA
tctgtctatatctgctcatt

SEQ ID NO: 807 - RNA, 20 nt, synthetic construct
  misc_feature 1..20: note = synthesized
  source 1..20: mol_type = other RNA
tctttctatatctgctcatt

SEQ ID NO: 808 - RNA, 20 nt, synthetic construct
  misc_feature 1..20: note = synthesized
  source 1..20: mol_type = other RNA
tctttttgaagttaatgtaa

SEQ ID NO: 809 - RNA, 20 nt, synthetic construct
  misc_feature 1..20: note = synthesized
  source 1..20: mol_type = other RNA
tgacaataagcgtatcttta

SEQ ID NO: 810 - RNA, 20 nt, synthetic construct
  misc_feature 1..20: note = synthesized
  source 1..20: mol_type = other RNA
tgacaataagggtatcttta

SEQ ID NO: 811 - RNA, 20 nt, synthetic construct
  misc_feature 1..20: note = synthesized
  source 1..20: mol_type = other RNA
tgagcagatatagaaagaca

SEQ ID NO: 812 - RNA, 20 nt, synthetic construct
  misc_feature 1..20: note = synthesized
  source 1..20: mol_type = other RNA
tgagcagatatagacagaca

SEQ ID NO: 813 - RNA, 20 nt, synthetic construct
  misc_feature 1..20: note = synthesized
  source 1..20: mol_type = other RNA
tgatatatctatccttttga

SEQ ID NO: 814 - RNA, 20 nt, synthetic construct
  misc_feature 1..20: note = synthesized
  source 1..20: mol_type = other RNA
tgatatatctatctttttga

SEQ ID NO: 815 - RNA, 20 nt, synthetic construct
  misc_feature 1..20: note = synthesized
  source 1..20: mol_type = other RNA
tgcacatttaaagataccct

SEQ ID NO: 816 - RNA, 20 nt, synthetic construct
  misc_feature 1..20: note = synthesized
  source 1..20: mol_type = other RNA
tgcacatttaaagatacgct

SEQ ID NO: 817 - RNA, 20 nt, synthetic construct
  misc_feature 1..20: note = synthesized
  source 1..20: mol_type = other RNA
tgtctatatctgctcatttc

SEQ ID NO: 818 - RNA, 20 nt, synthetic construct
  misc_feature 1..20: note = synthesized
  source 1..20: mol_type = other RNA
tgtctgtctatatctgctca

SEQ ID NO: 819 - RNA, 20 nt, synthetic construct
  misc_feature 1..20: note = synthesized
  source 1..20: mol_type = other RNA
tgtctttctatatctgctca

SEQ ID NO: 820 - RNA, 20 nt, synthetic construct
  misc_feature 1..20: note = synthesized
  source 1..20: mol_type = other RNA
tgtgacaataagcgtatctt

SEQ ID NO: 821 - RNA, 20 nt, synthetic construct
  misc_feature 1..20: note = synthesized
  source 1..20: mol_type = other RNA
tgtgacaataagggtatctt

SEQ ID NO: 822 - RNA, 20 nt, synthetic construct
  misc_feature 1..20: note = synthesized
  source 1..20: mol_type = other RNA
tgtttgatatatctatcctt

SEQ ID NO: 823 - RNA, 20 nt, synthetic construct
  misc_feature 1..20: note = synthesized
  source 1..20: mol_type = other RNA
tgtttgatatatctatcttt

SEQ ID NO: 824 - RNA, 20 nt, synthetic construct
  misc_feature 1..20: note = synthesized
  source 1..20: mol_type = other RNA
ttaaagatacccttattgtc

SEQ ID NO: 825 - RNA, 20 nt, synthetic construct
  misc_feature 1..20: note = synthesized
  source 1..20: mol_type = other RNA
ttaaagatacgcttattgtc

SEQ ID NO: 826 - RNA, 20 nt, synthetic construct
  misc_feature 1..20: note = synthesized
  source 1..20: mol_type = other RNA
ttaacttcaaaaagatagat

SEQ ID NO: 827 - RNA, 20 nt, synthetic construct
  misc_feature 1..20: note = synthesized
  source 1..20: mol_type = other RNA
ttaacttcaaaaggatagat

SEQ ID NO: 828 - RNA, 20 nt, synthetic construct
  misc_feature 1..20: note = synthesized
  source 1..20: mol_type = other RNA
ttacattaacttcaaaaaga

SEQ ID NO: 829 - RNA, 20 nt, synthetic construct
  misc_feature 1..20: note = synthesized
  source 1..20: mol_type = other RNA
ttacattaacttcaaaagga

SEQ ID NO: 830 - RNA, 20 nt, synthetic construct
  misc_feature 1..20: note = synthesized
  source 1..20: mol_type = other RNA
ttctatatctgctcatttca

SEQ ID NO: 831 - RNA, 20 nt, synthetic construct
  misc_feature 1..20: note = synthesized
  source 1..20: mol_type = other RNA
ttgatatatctatccttttg

SEQ ID NO: 832 - RNA, 20 nt, synthetic construct
  misc_feature 1..20: note = synthesized
  source 1..20: mol_type = other RNA
ttgatatatctatctttttg

SEQ ID NO: 833 - RNA, 20 nt, synthetic construct
  misc_feature 1..20: note = synthesized
  source 1..20: mol_type = other RNA
ttgcacatttaaagataccc

SEQ ID NO: 834 - RNA, 20 nt, synthetic construct
  misc_feature 1..20: note = synthesized
  source 1..20: mol_type = other RNA
ttgcacatttaaagatacgc

SEQ ID NO: 835 - RNA, 20 nt, synthetic construct
  misc_feature 1..20: note = synthesized
  source 1..20: mol_type = other RNA
ttgtctgtctatatctgctc

SEQ ID NO: 836 - RNA, 20 nt, synthetic construct
  misc_feature 1..20: note = synthesized
  source 1..20: mol_type = other RNA
ttgtctttctatatctgctc

SEQ ID NO: 837 - RNA, 20 nt, synthetic construct
  misc_feature 1..20: note = synthesized
  source 1..20: mol_type = other RNA
tttaaagatacccttattgt

SEQ ID NO: 838 - RNA, 20 nt, synthetic construct
  misc_feature 1..20: note = synthesized
  source 1..20: mol_type = other RNA
tttaaagatacgcttattgt

SEQ ID NO: 839 - RNA, 20 nt, synthetic construct
  misc_feature 1..20: note = synthesized
  source 1..20: mol_type = other RNA
tttctatatctgctcatttc

SEQ ID NO: 840 - RNA, 20 nt, synthetic construct
  misc_feature 1..20: note = synthesized
  source 1..20: mol_type = other RNA
tttgatatatctatcctttt

SEQ ID NO: 841 - RNA, 20 nt, synthetic construct
  misc_feature 1..20: note = synthesized
  source 1..20: mol_type = other RNA
tttgatatatctatcttttt

SEQ ID NO: 842 - RNA, 20 nt, synthetic construct
  misc_feature 1..20: note = synthesized
  source 1..20: mol_type = other RNA
tttgcacatttaaagatacc

SEQ ID NO: 843 - RNA, 20 nt, synthetic construct
  misc_feature 1..20: note = synthesized
  source 1..20: mol_type = other RNA
tttgcacatttaaagatacg

SEQ ID NO: 844 - RNA, 20 nt, synthetic construct
  misc_feature 1..20: note = synthesized
  source 1..20: mol_type = other RNA
tttgtctgtctatatctgct

SEQ ID NO: 845 - RNA, 20 nt, synthetic construct
  misc_feature 1..20: note = synthesized
  source 1..20: mol_type = other RNA
tttgtctttctatatctgct

SEQ ID NO: 846 - RNA, 20 nt, synthetic construct
  misc_feature 1..20: note = synthesized
  source 1..20: mol_type = other RNA
tttttgaagttaatgtaata

SEQ ID NO: 847 - RNA, 20 nt, synthetic construct
  misc_feature 1..20: note = synthesized
  source 1..20: mol_type = other RNA
aaacattcaatacacattag

SEQ ID NO: 848 - RNA, 20 nt, synthetic construct
  misc_feature 1..20: note = synthesized
  source 1..20: mol_type = other RNA
aaacattcagtacacattag

SEQ ID NO: 849 - RNA, 20 nt, synthetic construct
  misc_feature 1..20: note = synthesized
  source 1..20: mol_type = other RNA
aacattcaatacacattagc

SEQ ID NO: 850 - RNA, 20 nt, synthetic construct
  misc_feature 1..20: note = synthesized
  source 1..20: mol_type = other RNA
aacattcagtacacattagc

SEQ ID NO: 851 - RNA, 20 nt, synthetic construct
  misc_feature 1..20: note = synthesized
  source 1..20: mol_type = other RNA
aagacttagtaaacattcaa

SEQ ID NO: 852 - RNA, 20 nt, synthetic construct
  misc_feature 1..20: note = synthesized
  source 1..20: mol_type = other RNA
aagacttagtaaacattcag

SEQ ID NO: 853 - RNA, 20 nt, synthetic construct
  misc_feature 1..20: note = synthesized
  source 1..20: mol_type = other RNA
aatacacattagctattact

SEQ ID NO: 854 - RNA, 20 nt, synthetic construct
  misc_feature 1..20: note = synthesized
  source 1..20: mol_type = other RNA
aatagctaatgtgtactgaa

SEQ ID NO: 855 - RNA, 20 nt, synthetic construct
  misc_feature 1..20: note = synthesized
  source 1..20: mol_type = other RNA
aatagctaatgtgtattgaa

SEQ ID NO: 856 - RNA, 20 nt, synthetic construct
  misc_feature 1..20: note = synthesized
  source 1..20: mol_type = other RNA
aatgtgtactgaatgtttac

SEQ ID NO: 857 - RNA, 20 nt, synthetic construct
  misc_feature 1..20: note = synthesized
  source 1..20: mol_type = other RNA
aatgtgtattgaatgtttac

SEQ ID NO: 858 - RNA, 20 nt, synthetic construct
  misc_feature 1..20: note = synthesized
  source 1..20: mol_type = other RNA
acattcaatacacattagct

SEQ ID NO: 859 - RNA, 20 nt, synthetic construct
  misc_feature 1..20: note = synthesized
  source 1..20: mol_type = other RNA
acattcagtacacattagct

SEQ ID NO: 860 - RNA, 20 nt, synthetic construct
  misc_feature 1..20: note = synthesized
  source 1..20: mol_type = other RNA
acttagtaaacattcaatac

SEQ ID NO: 861 - RNA, 20 nt, synthetic construct
  misc_feature 1..20: note = synthesized
  source 1..20: mol_type = other RNA
acttagtaaacattcagtac

SEQ ID NO: 862 - RNA, 20 nt, synthetic construct
  misc_feature 1..20: note = synthesized
  source 1..20: mol_type = other RNA
agacttagtaaacattcaat

SEQ ID NO: 863 - RNA, 20 nt, synthetic construct
  misc_feature 1..20: note = synthesized
  source 1..20: mol_type = other RNA
agacttagtaaacattcagt

SEQ ID NO: 864 - RNA, 20 nt, synthetic construct
  misc_feature 1..20: note = synthesized
  source 1..20: mol_type = other RNA
agctaatgtgtactgaatgt

SEQ ID NO: 865 - RNA, 20 nt, synthetic construct
  misc_feature 1..20: note = synthesized
  source 1..20: mol_type = other RNA
agctaatgtgtattgaatgt

SEQ ID NO: 866 - RNA, 20 nt, synthetic construct
  misc_feature 1..20: note = synthesized
  source 1..20: mol_type = other RNA
agtaaacattcaatacacat

SEQ ID NO: 867 - RNA, 20 nt, synthetic construct
  misc_feature 1..20: note = synthesized
  source 1..20: mol_type = other RNA
agtaaacattcagtacacat

SEQ ID NO: 868 - RNA, 20 nt, synthetic construct
  misc_feature 1..20: note = synthesized
  source 1..20: mol_type = other RNA
agtaatagctaatgtgtact

SEQ ID NO: 869 - RNA, 20 nt, synthetic construct
  misc_feature 1..20: note = synthesized
  source 1..20: mol_type = other RNA
agtaatagctaatgtgtatt

SEQ ID NO: 870 - RNA, 20 nt, synthetic construct
  misc_feature 1..20: note = synthesized
  source 1..20: mol_type = other RNA
agtacacattagctattact

SEQ ID NO: 871 - RNA, 20 nt, synthetic construct
  misc_feature 1..20: note = synthesized
  source 1..20: mol_type = other RNA
atacacattagctattactc

SEQ ID NO: 872 - RNA, 20 nt, synthetic construct
  misc_feature 1..20: note = synthesized
  source 1..20: mol_type = other RNA
atagctaatgtgtactgaat

SEQ ID NO: 873 - RNA, 20 nt, synthetic construct
  misc_feature 1..20: note = synthesized
  source 1..20: mol_type = other RNA
atagctaatgtgtattgaat

SEQ ID NO: 874 - RNA, 20 nt, synthetic construct
  misc_feature 1..20: note = synthesized
  source 1..20: mol_type = other RNA
atgtgtactgaatgtttact

SEQ ID NO: 875 - RNA, 20 nt, synthetic construct
  misc_feature 1..20: note = synthesized
  source 1..20: mol_type = other RNA
atgtgtattgaatgtttact

SEQ ID NO: 876 - RNA, 20 nt, synthetic construct
  misc_feature 1..20: note = synthesized
  source 1..20: mol_type = other RNA
attcaatacacattagctat

SEQ ID NO: 877 - RNA, 20 nt, synthetic construct
  misc_feature 1..20: note = synthesized
  source 1..20: mol_type = other RNA
attcagtacacattagctat

SEQ ID NO: 878 - RNA, 20 nt, synthetic construct
  misc_feature 1..20: note = synthesized
  source 1..20: mol_type = other RNA
caatacacattagctattac

SEQ ID NO: 879 - RNA, 20 nt, synthetic construct
  misc_feature 1..20: note = synthesized
  source 1..20: mol_type = other RNA
cagtacacattagctattac

SEQ ID NO: 880 - RNA, 20 nt, synthetic construct
  misc_feature 1..20: note = synthesized
  source 1..20: mol_type = other RNA
cattcaatacacattagcta

SEQ ID NO: 881 - RNA, 20 nt, synthetic construct
  misc_feature 1..20: note = synthesized
  source 1..20: mol_type = other RNA
cattcagtacacattagcta

SEQ ID NO: 882 - RNA, 20 nt, synthetic construct
  misc_feature 1..20: note = synthesized
  source 1..20: mol_type = other RNA
ctaatgtgtactgaatgttt

SEQ ID NO: 883 - RNA, 20 nt, synthetic construct
  misc_feature 1..20: note = synthesized
  source 1..20: mol_type = other RNA
ctaatgtgtattgaatgttt

SEQ ID NO: 884 - RNA, 20 nt, synthetic construct
  misc_feature 1..20: note = synthesized
  source 1..20: mol_type = other RNA
cttagtaaacattcaataca

SEQ ID NO: 885 - RNA, 20 nt, synthetic construct
  misc_feature 1..20: note = synthesized
  source 1..20: mol_type = other RNA
cttagtaaacattcagtaca

SEQ ID NO: 886 - RNA, 20 nt, synthetic construct
  misc_feature 1..20: note = synthesized
  source 1..20: mol_type = other RNA
gacttagtaaacattcaata

SEQ ID NO: 887 - RNA, 20 nt, synthetic construct
  misc_feature 1..20: note = synthesized
  source 1..20: mol_type = other RNA
gacttagtaaacattcagta

SEQ ID NO: 888 - RNA, 20 nt, synthetic construct
  misc_feature 1..20: note = synthesized
  source 1..20: mol_type = other RNA
gctaatgtgtactgaatgtt

SEQ ID NO: 889 - RNA, 20 nt, synthetic construct
  misc_feature 1..20: note = synthesized
  source 1..20: mol_type = other RNA
gctaatgtgtattgaatgtt

SEQ ID NO: 890 - RNA, 20 nt, synthetic construct
  misc_feature 1..20: note = synthesized
  source 1..20: mol_type = other RNA
gtaaacattcaatacacatt

SEQ ID NO: 891 - RNA, 20 nt, synthetic construct
  misc_feature 1..20: note = synthesized
  source 1..20: mol_type = other RNA
gtaaacattcagtacacatt

SEQ ID NO: 892 - RNA, 20 nt, synthetic construct
  misc_feature 1..20: note = synthesized
  source 1..20: mol_type = other RNA
gtaatagctaatgtgtactg

SEQ ID NO: 893 - RNA, 20 nt, synthetic construct
  misc_feature 1..20: note = synthesized
  source 1..20: mol_type = other RNA
gtaatagctaatgtgtattg

SEQ ID NO: 894 - RNA, 20 nt, synthetic construct
  misc_feature 1..20: note = synthesized
  source 1..20: mol_type = other RNA
gtacacattagctattactc

SEQ ID NO: 895 - RNA, 20 nt, synthetic construct
  misc_feature 1..20: note = synthesized
  source 1..20: mol_type = other RNA
gtactgaatgtttactaagt

SEQ ID NO: 896 - RNA, 20 nt, synthetic construct
  misc_feature 1..20: note = synthesized
  source 1..20: mol_type = other RNA
gtattgaatgtttactaagt

SEQ ID NO: 897 - RNA, 20 nt, synthetic construct
  misc_feature 1..20: note = synthesized
  source 1..20: mol_type = other RNA
gtgtactgaatgtttactaa

SEQ ID NO: 898 - RNA, 20 nt, synthetic construct
  misc_feature 1..20: note = synthesized
  source 1..20: mol_type = other RNA
gtgtattgaatgtttactaa

SEQ ID NO: 899 - RNA, 20 nt, synthetic construct
  misc_feature 1..20: note = synthesized
  source 1..20: mol_type = other RNA
taaacattcaatacacatta

SEQ ID NO: 900 - RNA, 20 nt, synthetic construct
  misc_feature 1..20: note = synthesized
  source 1..20: mol_type = other RNA
taaacattcagtacacatta

SEQ ID NO: 901 - RNA, 20 nt, synthetic construct
  misc_feature 1..20: note = synthesized
  source 1..20: mol_type = other RNA
taatagctaatgtgtactga

SEQ ID NO: 902 - RNA, 20 nt, synthetic construct
  misc_feature 1..20: note = synthesized
  source 1..20: mol_type = other RNA
taatagctaatgtgtattga

SEQ ID NO: 903 - RNA, 20 nt, synthetic construct
  misc_feature 1..20: note = synthesized
  source 1..20: mol_type = other RNA
tactgaatgtttactaagtc

SEQ ID NO: 904 - RNA, 20 nt, synthetic construct
  misc_feature 1..20: note = synthesized
  source 1..20: mol_type = other RNA
tagctaatgtgtactgaatg

SEQ ID NO: 905 - RNA, 20 nt, synthetic construct
  misc_feature 1..20: note = synthesized
  source 1..20: mol_type = other RNA
tagctaatgtgtattgaatg

SEQ ID NO: 906 - RNA, 20 nt, synthetic construct
  misc_feature 1..20: note = synthesized
  source 1..20: mol_type = other RNA
tagtaaacattcaatacaca

SEQ ID NO: 907 - RNA, 20 nt, synthetic construct
  misc_feature 1..20: note = synthesized
  source 1..20: mol_type = other RNA
tagtaaacattcagtacaca

SEQ ID NO: 908 - RNA, 20 nt, synthetic construct
  misc_feature 1..20: note = synthesized
  source 1..20: mol_type = other RNA
tattgaatgtttactaagtc

SEQ ID NO: 909 - RNA, 20 nt, synthetic construct
  misc_feature 1..20: note = synthesized
  source 1..20: mol_type = other RNA
tcaatacacattagctatta

SEQ ID NO: 910 - RNA, 20 nt, synthetic construct
  misc_feature 1..20: note = synthesized
  source 1..20: mol_type = other RNA
tcagtacacattagctatta

SEQ ID NO: 911 - RNA, 20 nt, synthetic construct
  misc_feature 1..20: note = synthesized
  source 1..20: mol_type = other RNA
tgtactgaatgtttactaag

SEQ ID NO: 912 - RNA, 20 nt, synthetic construct
  misc_feature 1..20: note = synthesized
  source 1..20: mol_type = other RNA
tgtattgaatgtttactaag

SEQ ID NO: 913 - RNA, 20 nt, synthetic construct
  misc_feature 1..20: note = synthesized
  source 1..20: mol_type = other RNA
tgtgtactgaatgtttacta

SEQ ID NO: 914 - RNA, 20 nt, synthetic construct
  misc_feature 1..20: note = synthesized
  source 1..20: mol_type = other RNA
tgtgtattgaatgtttacta

SEQ ID NO: 915 - RNA, 20 nt, synthetic construct
  misc_feature 1..20: note = synthesized
  source 1..20: mol_type = other RNA
ttagtaaacattcaatacac

SEQ ID NO: 916 - RNA, 20 nt, synthetic construct
  misc_feature 1..20: note = synthesized
  source 1..20: mol_type = other RNA
ttagtaaacattcagtacac

SEQ ID NO: 917 - RNA, 20 nt, synthetic construct
  misc_feature 1..20: note = synthesized
  source 1..20: mol_type = other RNA
ttcaatacacattagctatt

SEQ ID NO: 918 - RNA, 20 nt, synthetic construct
  misc_feature 1..20: note = synthesized
  source 1..20: mol_type = other RNA
ttcagtacacattagctatt

SEQ ID NO: 919 - RNA, 20 nt, synthetic construct
  misc_feature 1..20: note = synthesized
  source 1..20: mol_type = other RNA
aaagaaaggattgccgccac

SEQ ID NO: 920 - RNA, 20 nt, synthetic construct
  misc_feature 1..20: note = synthesized
  source 1..20: mol_type = other RNA
aaagaaaggattgctgccac

SEQ ID NO: 921 - RNA, 20 nt, synthetic construct
  misc_feature 1..20: note = synthesized
  source 1..20: mol_type = other RNA
aaaggattgccgccactcct

SEQ ID NO: 922 - RNA, 20 nt, synthetic construct
  misc_feature 1..20: note = synthesized
  source 1..20: mol_type = other RNA
aaaggattgctgccactcct

SEQ ID NO: 923 - RNA, 20 nt, synthetic construct
  misc_feature 1..20: note = synthesized
  source 1..20: mol_type = other RNA
aactaggagtggcagcaatc

SEQ ID NO: 924 - RNA, 20 nt, synthetic construct
  misc_feature 1..20: note = synthesized
  source 1..20: mol_type = other RNA
aactaggagtggcggcaatc

SEQ ID NO: 925 - RNA, 20 nt, synthetic construct
  misc_feature 1..20: note = synthesized
  source 1..20: mol_type = other RNA
aagaaaggattgccgccact

SEQ ID NO: 926 - RNA, 20 nt, synthetic construct
  misc_feature 1..20: note = synthesized
  source 1..20: mol_type = other RNA
aagaaaggattgctgccact

SEQ ID NO: 927 - RNA, 20 nt, synthetic construct
  misc_feature 1..20: note = synthesized
  source 1..20: mol_type = other RNA
aaggattgccgccactccta

SEQ ID NO: 928 - RNA, 20 nt, synthetic construct
  misc_feature 1..20: note = synthesized
  source 1..20: mol_type = other RNA
aaggattgctgccactccta

SEQ ID NO: 929 - RNA, 20 nt, synthetic construct
  misc_feature 1..20: note = synthesized
  source 1..20: mol_type = other RNA
actaggagtggcagcaatcc

SEQ ID NO: 930 - RNA, 20 nt, synthetic construct
  misc_feature 1..20: note = synthesized
  source 1..20: mol_type = other RNA
actaggagtggcggcaatcc

SEQ ID NO: 931 - RNA, 20 nt, synthetic construct
  misc_feature 1..20: note = synthesized
  source 1..20: mol_type = other RNA
agaaaggattgccgccactc

SEQ ID NO: 932 - RNA, 20 nt, synthetic construct
  misc_feature 1..20: note = synthesized
  source 1..20: mol_type = other RNA
agaaaggattgctgccactc

SEQ ID NO: 933 - RNA, 20 nt, synthetic construct
  misc_feature 1..20: note = synthesized
  source 1..20: mol_type = other RNA
agctgaaagaaaggattgcc

SEQ ID NO: 934 - RNA, 20 nt, synthetic construct
  misc_feature 1..20: note = synthesized
  source 1..20: mol_type = other RNA
agctgaaagaaaggattgct

SEQ ID NO: 935 - RNA, 20 nt, synthetic construct
  misc_feature 1..20: note = synthesized
  source 1..20: mol_type = other RNA
aggagtggcagcaatccttt

SEQ ID NO: 936 - RNA, 20 nt, synthetic construct
  misc_feature 1..20: note = synthesized
  source 1..20: mol_type = other RNA
aggagtggcggcaatccttt

SEQ ID NO: 937 - RNA, 20 nt, synthetic construct
  misc_feature 1..20: note = synthesized
  source 1..20: mol_type = other RNA
aggattgccgccactcctag

SEQ ID NO: 938 - RNA, 20 nt, synthetic construct
  misc_feature 1..20: note = synthesized
  source 1..20: mol_type = other RNA
aggattgctgccactcctag

SEQ ID NO: 939 - RNA, 20 nt, synthetic construct
  misc_feature 1..20: note = synthesized
  source 1..20: mol_type = other RNA
agtggcagcaatcctttctt

SEQ ID NO: 940 - RNA, 20 nt, synthetic construct
  misc_feature 1..20: note = synthesized
  source 1..20: mol_type = other RNA
agtggcggcaatcctttctt

SEQ ID NO: 941 - RNA, 20 nt, synthetic construct
  misc_feature 1..20: note = synthesized
  source 1..20: mol_type = other RNA
atgggaactaggagtggcag

SEQ ID NO: 942 - RNA, 20 nt, synthetic construct
  misc_feature 1..20: note = synthesized
  source 1..20: mol_type = other RNA
atgggaactaggagtggcgg

SEQ ID NO: 943 - RNA, 20 nt, synthetic construct
  misc_feature 1..20: note = synthesized
  source 1..20: mol_type = other RNA
attgccgccactcctagttc

SEQ ID NO: 944 - RNA, 20 nt, synthetic construct
  misc_feature 1..20: note = synthesized
  source 1..20: mol_type = other RNA
attgctgccactcctagttc

SEQ ID NO: 945 - RNA, 20 nt, synthetic construct
  misc_feature 1..20: note = synthesized
  source 1..20: mol_type = other RNA
ccgccactcctagttcccat

SEQ ID NO: 946 - RNA, 20 nt, synthetic construct
  misc_feature 1..20: note = synthesized
  source 1..20: mol_type = other RNA
cgccactcctagttcccatc

SEQ ID NO: 947 - RNA, 20 nt, synthetic construct
  misc_feature 1..20: note = synthesized
  source 1..20: mol_type = other RNA
ctaggagtggcagcaatcct

SEQ ID NO: 948 - RNA, 20 nt, synthetic construct
  misc_feature 1..20: note = synthesized
  source 1..20: mol_type = other RNA
ctaggagtggcggcaatcct

SEQ ID NO: 949 - RNA, 20 nt, synthetic construct
  misc_feature 1..20: note = synthesized
  source 1..20: mol_type = other RNA
ctgaaagaaaggattgccgc

SEQ ID NO: 950 - RNA, 20 nt, synthetic construct
  misc_feature 1..20: note = synthesized
  source 1..20: mol_type = other RNA
ctgaaagaaaggattgctgc

SEQ ID NO: 951 - RNA, 20 nt, synthetic construct
  misc_feature 1..20: note = synthesized
  source 1..20: mol_type = other RNA
ctgccactcctagttcccat

SEQ ID NO: 952 - RNA, 20 nt, synthetic construct
  misc_feature 1..20: note = synthesized
  source 1..20: mol_type = other RNA
gaaagaaaggattgccgcca

SEQ ID NO: 953 - RNA, 20 nt, synthetic construct
  misc_feature 1..20: note = synthesized
  source 1..20: mol_type = other RNA
gaaagaaaggattgctgcca

SEQ ID NO: 954 - RNA, 20 nt, synthetic construct
  misc_feature 1..20: note = synthesized
  source 1..20: mol_type = other RNA
gaaaggattgccgccactcc

SEQ ID NO: 955 - RNA, 20 nt, synthetic construct
  misc_feature 1..20: note = synthesized
  source 1..20: mol_type = other RNA
gaaaggattgctgccactcc

SEQ ID NO: 956 - RNA, 20 nt, synthetic construct
  misc_feature 1..20: note = synthesized
  source 1..20: mol_type = other RNA
gaactaggagtggcagcaat

SEQ ID NO: 957 - RNA, 20 nt, synthetic construct
  misc_feature 1..20: note = synthesized
  source 1..20: mol_type = other RNA
gaactaggagtggcggcaat

SEQ ID NO: 958 - RNA, 20 nt, synthetic construct
  misc_feature 1..20: note = synthesized
  source 1..20: mol_type = other RNA
gagtggcagcaatcctttct

SEQ ID NO: 959 - RNA, 20 nt, synthetic construct
  misc_feature 1..20: note = synthesized
  source 1..20: mol_type = other RNA
gagtggcggcaatcctttct

SEQ ID NO: 960 - RNA, 20 nt, synthetic construct
  misc_feature 1..20: note = synthesized
  source 1..20: mol_type = other RNA
gatgggaactaggagtggca

SEQ ID NO: 961 - RNA, 20 nt, synthetic construct
  misc_feature 1..20: note = synthesized
  source 1..20: mol_type = other RNA
gatgggaactaggagtggcg

SEQ ID NO: 962 - RNA, 20 nt, synthetic construct
  misc_feature 1..20: note = synthesized
  source 1..20: mol_type = other RNA
gattgccgccactcctagtt

SEQ ID NO: 963 - RNA, 20 nt, synthetic construct
  misc_feature 1..20: note = synthesized
  source 1..20: mol_type = other RNA
gattgctgccactcctagtt

SEQ ID NO: 964 - RNA, 20 nt, synthetic construct
  misc_feature 1..20: note = synthesized
  source 1..20: mol_type = other RNA
gcagcaatcctttctttcag

SEQ ID NO: 965 - RNA, 20 nt, synthetic construct
  misc_feature 1..20: note = synthesized
  source 1..20: mol_type = other RNA
gccgccactcctagttccca

SEQ ID NO: 966 - RNA, 20 nt, synthetic construct
  misc_feature 1..20: note = synthesized
  source 1..20: mol_type = other RNA
gcggcaatcctttctttcag

SEQ ID NO: 967 - RNA, 20 nt, synthetic construct
  misc_feature 1..20: note = synthesized
  source 1..20: mol_type = other RNA
gctgaaagaaaggattgccg

SEQ ID NO: 968 - RNA, 20 nt, synthetic construct
  misc_feature 1..20: note = synthesized
  source 1..20: mol_type = other RNA
gctgaaagaaaggattgctg

SEQ ID NO: 969 - RNA, 20 nt, synthetic construct
  misc_feature 1..20: note = synthesized
  source 1..20: mol_type = other RNA
gctgccactcctagttccca

SEQ ID NO: 970 - RNA, 20 nt, synthetic construct
  misc_feature 1..20: note = synthesized
  source 1..20: mol_type = other RNA
ggaactaggagtggcagcaa

SEQ ID NO: 971 - RNA, 20 nt, synthetic construct
  misc_feature 1..20: note = synthesized
  source 1..20: mol_type = other RNA
ggaactaggagtggcggcaa

SEQ ID NO: 972 - RNA, 20 nt, synthetic construct
  misc_feature 1..20: note = synthesized
  source 1..20: mol_type = other RNA
ggagtggcagcaatcctttc

SEQ ID NO: 973 - RNA, 20 nt, synthetic construct
  misc_feature 1..20: note = synthesized
  source 1..20: mol_type = other RNA
ggagtggcggcaatcctttc

SEQ ID NO: 974 - RNA, 20 nt, synthetic construct
  misc_feature 1..20: note = synthesized
  source 1..20: mol_type = other RNA
ggcagcaatcctttctttca

SEQ ID NO: 975 - RNA, 20 nt, synthetic construct
  misc_feature 1..20: note = synthesized
  source 1..20: mol_type = other RNA
ggcggcaatcctttctttca

SEQ ID NO: 976 - RNA, 20 nt, synthetic construct
  misc_feature 1..20: note = synthesized
  source 1..20: mol_type = other RNA
gggaactaggagtggcagca

SEQ ID NO: 977 - RNA, 20 nt, synthetic construct
  misc_feature 1..20: note = synthesized
  source 1..20: mol_type = other RNA
gggaactaggagtggcggca

SEQ ID NO: 978 - RNA, 20 nt, synthetic construct
  misc_feature 1..20: note = synthesized
  source 1..20: mol_type = other RNA
gtggcagcaatcctttcttt

SEQ ID NO: 979 - RNA, 20 nt, synthetic construct
  misc_feature 1..20: note = synthesized
  source 1..20: mol_type = other RNA
gtggcggcaatcctttcttt

SEQ ID NO: 980 - RNA, 20 nt, synthetic construct
  misc_feature 1..20: note = synthesized
  source 1..20: mol_type = other RNA
taggagtggcagcaatcctt

SEQ ID NO: 981 - RNA, 20 nt, synthetic construct
  misc_feature 1..20: note = synthesized
  source 1..20: mol_type = other RNA
taggagtggcggcaatcctt

SEQ ID NO: 982 - RNA, 20 nt, synthetic construct
  misc_feature 1..20: note = synthesized
  source 1..20: mol_type = other RNA
tgaaagaaaggattgccgcc

SEQ ID NO: 983 - RNA, 20 nt, synthetic construct
  misc_feature 1..20: note = synthesized
  source 1..20: mol_type = other RNA
tgaaagaaaggattgctgcc

SEQ ID NO: 984 - RNA, 20 nt, synthetic construct
  misc_feature 1..20: note = synthesized
  source 1..20: mol_type = other RNA
tgccactcctagttcccatc

SEQ ID NO: 985 - RNA, 20 nt, synthetic construct
  misc_feature 1..20: note = synthesized
  source 1..20: mol_type = other RNA
tgccgccactcctagttccc

SEQ ID NO: 986 - RNA, 20 nt, synthetic construct
  misc_feature 1..20: note = synthesized
  source 1..20: mol_type = other RNA
tgctgccactcctagttccc

SEQ ID NO: 987 - RNA, 20 nt, synthetic construct
  misc_feature 1..20: note = synthesized
  source 1..20: mol_type = other RNA
tggcagcaatcctttctttc

SEQ ID NO: 988 - RNA, 20 nt, synthetic construct
  misc_feature 1..20: note = synthesized
  source 1..20: mol_type = other RNA
tggcggcaatcctttctttc

SEQ ID NO: 989 - RNA, 20 nt, synthetic construct
  misc_feature 1..20: note = synthesized
  source 1..20: mol_type = other RNA
tgggaactaggagtggcagc

SEQ ID NO: 990 - RNA, 20 nt, synthetic construct
  misc_feature 1..20: note = synthesized
  source 1..20: mol_type = other RNA
tgggaactaggagtggcggc

SEQ ID NO: 991 - RNA, 20 nt, synthetic construct
  misc_feature 1..20: note = synthesized
  source 1..20: mol_type = other RNA
ttgccgccactcctagttcc

SEQ ID NO: 992 - RNA, 20 nt, synthetic construct
  misc_feature 1..20: note = synthesized
  source 1..20: mol_type = other RNA
ttgctgccactcctagttcc

SEQ ID NO: 993 - RNA, 20 nt, synthetic construct
  misc_feature 1..20: note = synthesized
  source 1..20: mol_type = other RNA
aagtactggaagctggaact

SEQ ID NO: 994 - RNA, 20 nt, synthetic construct
  misc_feature 1..20: note = synthesized
  source 1..20: mol_type = other RNA
aagtgctggaagctggaact

SEQ ID NO: 995 - RNA, 20 nt, synthetic construct
  misc_feature 1..20: note = synthesized
  source 1..20: mol_type = other RNA
actggaagctggaactctgg

SEQ ID NO: 996 - RNA, 20 nt, synthetic construct
  misc_feature 1..20: note = synthesized
  source 1..20: mol_type = other RNA
agagttccagcttccagcac

SEQ ID NO: 997 - RNA, 20 nt, synthetic construct
  misc_feature 1..20: note = synthesized
  source 1..20: mol_type = other RNA
agagttccagcttccagtac

SEQ ID NO: 998 - RNA, 20 nt, synthetic construct
  misc_feature 1..20: note = synthesized
  source 1..20: mol_type = other RNA
agcacttccaggtccagagc

SEQ ID NO: 999 - RNA, 20 nt, synthetic construct
  misc_feature 1..20: note = synthesized
  source 1..20: mol_type = other RNA
agcttccagcacttccaggt

SEQ ID NO: 1000 - RNA, 20 nt, synthetic construct
  misc_feature 1..20: note = synthesized
  source 1..20: mol_type = other RNA
agcttccagtacttccaggt

SEQ ID NO: 1001 - RNA, 20 nt, synthetic construct
  misc_feature 1..20: note = synthesized
  source 1..20: mol_type = other RNA
agtacttccaggtccagagc

SEQ ID NO: 1002 - RNA, 20 nt, synthetic construct
  misc_feature 1..20: note = synthesized
  source 1..20: mol_type = other RNA
cacttccaggtccagagctc

SEQ ID NO: 1003 - RNA, 20 nt, synthetic construct
  misc_feature 1..20: note = synthesized
  source 1..20: mol_type = other RNA
cagagttccagcttccagca

SEQ ID NO: 1004 - RNA, 20 nt, synthetic construct
  misc_feature 1..20: note = synthesized
  source 1..20: mol_type = other RNA
cagagttccagcttccagta

SEQ ID NO: 1005 - RNA, 20 nt, synthetic construct
  misc_feature 1..20: note = synthesized
  source 1..20: mol_type = other RNA
cagcacttccaggtccagag

SEQ ID NO: 1006 - RNA, 20 nt, synthetic construct
  misc_feature 1..20: note = synthesized
  source 1..20: mol_type = other RNA
cagcttccagcacttccagg

SEQ ID NO: 1007 - RNA, 20 nt, synthetic construct
  misc_feature 1..20: note = synthesized
  source 1..20: mol_type = other RNA
cagcttccagtacttccagg

SEQ ID NO: 1008 - RNA, 20 nt, synthetic construct
  misc_feature 1..20: note = synthesized
  source 1..20: mol_type = other RNA
cagtacttccaggtccagag

SEQ ID NO: 1009 - RNA, 20 nt, synthetic construct
  misc_feature 1..20: note = synthesized
  source 1..20: mol_type = other RNA
ccagagttccagcttccagc

SEQ ID NO: 1010 - RNA, 20 nt, synthetic construct
  misc_feature 1..20: note = synthesized
  source 1..20: mol_type = other RNA
ccagagttccagcttccagt

SEQ ID NO: 1011 - RNA, 20 nt, synthetic construct
  misc_feature 1..20: note = synthesized
  source 1..20: mol_type = other RNA
ccagcacttccaggtccaga

SEQ ID NO: 1012 - RNA, 20 nt, synthetic construct
  misc_feature 1..20: note = synthesized
  source 1..20: mol_type = other RNA
ccagcttccagcacttccag

SEQ ID NO: 1013 - RNA, 20 nt, synthetic construct
  misc_feature 1..20: note = synthesized
  source 1..20: mol_type = other RNA
ccagcttccagtacttccag

SEQ ID NO: 1014 - RNA, 20 nt, synthetic construct
  misc_feature 1..20: note = synthesized
  source 1..20: mol_type = other RNA
ccagtacttccaggtccaga

SEQ ID NO: 1015 - RNA, 20 nt, synthetic construct
  misc_feature 1..20: note = synthesized
  source 1..20: mol_type = other RNA
cctggaagtactggaagctg

SEQ ID NO: 1016 - RNA, 20 nt, synthetic construct
  misc_feature 1..20: note = synthesized
  source 1..20: mol_type = other RNA
cctggaagtgctggaagctg

SEQ ID NO: 1017 - RNA, 20 nt, synthetic construct
  misc_feature 1..20: note = synthesized
  source 1..20: mol_type = other RNA
ctctggacctggaagtactg

SEQ ID NO: 1018 - RNA, 20 nt, synthetic construct
  misc_feature 1..20: note = synthesized
  source 1..20: mol_type = other RNA
ctctggacctggaagtgctg

SEQ ID NO: 1019 - RNA, 20 nt, synthetic construct
  misc_feature 1..20: note = synthesized
  source 1..20: mol_type = other RNA
ctggaagtactggaagctgg

SEQ ID NO: 1020 - RNA, 20 nt, synthetic construct
  misc_feature 1..20: note = synthesized
  source 1..20: mol_type = other RNA
ctggaagtgctggaagctgg

SEQ ID NO: 1021 - RNA, 20 nt, synthetic construct
  misc_feature 1..20: note = synthesized
  source 1..20: mol_type = other RNA
ctggacctggaagtactgga

SEQ ID NO: 1022 - RNA, 20 nt, synthetic construct
  misc_feature 1..20: note = synthesized
  source 1..20: mol_type = other RNA
ctggacctggaagtgctgga

SEQ ID NO: 1023 - RNA, 20 nt, synthetic construct
  misc_feature 1..20: note = synthesized
  source 1..20: mol_type = other RNA
gaagtactggaagctggaac

SEQ ID NO: 1024 - RNA, 20 nt, synthetic construct
  misc_feature 1..20: note = synthesized
  source 1..20: mol_type = other RNA
gaagtgctggaagctggaac

SEQ ID NO: 1025 - RNA, 20 nt, synthetic construct
  misc_feature 1..20: note = synthesized
  source 1..20: mol_type = other RNA
gagctctggacctggaagta

SEQ ID NO: 1026 - RNA, 20 nt, synthetic construct
  misc_feature 1..20: note = synthesized
  source 1..20: mol_type = other RNA
gagctctggacctggaagtg

SEQ ID NO: 1027 - RNA, 20 nt, synthetic construct
  misc_feature 1..20: note = synthesized
  source 1..20: mol_type = other RNA
gagttccagcttccagcact

SEQ ID NO: 1028 - RNA, 20 nt, synthetic construct
  misc_feature 1..20: note = synthesized
  source 1..20: mol_type = other RNA
gagttccagcttccagtact

SEQ ID NO: 1029 - RNA, 20 nt, synthetic construct
  misc_feature 1..20: note = synthesized
  source 1..20: mol_type = other RNA
gcacttccaggtccagagct

SEQ ID NO: 1030 - RNA, 20 nt, synthetic construct
  misc_feature 1..20: note = synthesized
  source 1..20: mol_type = other RNA
gctggaagctggaactctgg

SEQ ID NO: 1031 - RNA, 20 nt, synthetic construct
  misc_feature 1..20: note = synthesized
  source 1..20: mol_type = other RNA
gcttccagcacttccaggtc

SEQ ID NO: 1032 - RNA, 20 nt, synthetic construct
  misc_feature 1..20: note = synthesized
  source 1..20: mol_type = other RNA
gcttccagtacttccaggtc

SEQ ID NO: 1033 - RNA, 20 nt, synthetic construct
  misc_feature 1..20: note = synthesized
  source 1..20: mol_type = other RNA
ggaagtactggaagctggaa

SEQ ID NO: 1034 - RNA, 20 nt, synthetic construct
  misc_feature 1..20: note = synthesized
  source 1..20: mol_type = other RNA
ggaagtgctggaagctggaa

SEQ ID NO: 1035 - RNA, 20 nt, synthetic construct
  misc_feature 1..20: note = synthesized
  source 1..20: mol_type = other RNA
ggacctggaagtactggaag

SEQ ID NO: 1036 - RNA, 20 nt, synthetic construct
  misc_feature 1..20: note = synthesized
  source 1..20: mol_type = other RNA
ggacctggaagtgctggaag

SEQ ID NO: 1037 - RNA, 20 nt, synthetic construct
  misc_feature 1..20: note = synthesized
  source 1..20: mol_type = other RNA
gtacttccaggtccagagct

SEQ ID NO: 1038 - RNA, 20 nt, synthetic construct
  misc_feature 1..20: note = synthesized
  source 1..20: mol_type = other RNA
gttccagcttccagcacttc

SEQ ID NO: 1039 - RNA, 20 nt, synthetic construct
  misc_feature 1..20: note = synthesized
  source 1..20: mol_type = other RNA
gttccagcttccagtacttc

SEQ ID NO: 1040 - RNA, 20 nt, synthetic construct
  misc_feature 1..20: note = synthesized
  source 1..20: mol_type = other RNA
tacttccaggtccagagctc

SEQ ID NO: 1041 - RNA, 20 nt, synthetic construct
  misc_feature 1..20: note = synthesized
  source 1..20: mol_type = other RNA
tccagcacttccaggtccag

SEQ ID NO: 1042 - RNA, 20 nt, synthetic construct
  misc_feature 1..20: note = synthesized
  source 1..20: mol_type = other RNA
tccagcttccagcacttcca

SEQ ID NO: 1043 - RNA, 20 nt, synthetic construct
  misc_feature 1..20: note = synthesized
  source 1..20: mol_type = other RNA
tccagcttccagtacttcca

SEQ ID NO: 1044 - RNA, 20 nt, synthetic construct
  misc_feature 1..20: note = synthesized
  source 1..20: mol_type = other RNA
tccagtacttccaggtccag

SEQ ID NO: 1045 - RNA, 20 nt, synthetic construct
  misc_feature 1..20: note = synthesized
  source 1..20: mol_type = other RNA
tctggacctggaagtactgg

SEQ ID NO: 1046 - RNA, 20 nt, synthetic construct
  misc_feature 1..20: note = synthesized
  source 1..20: mol_type = other RNA
tctggacctggaagtgctgg

SEQ ID NO: 1047 - RNA, 20 nt, synthetic construct
  misc_feature 1..20: note = synthesized
  source 1..20: mol_type = other RNA
tggaagtactggaagctgga

SEQ ID NO: 1048 - RNA, 20 nt, synthetic construct
  misc_feature 1..20: note = synthesized
  source 1..20: mol_type = other RNA
tggaagtgctggaagctgga

SEQ ID NO: 1049 - RNA, 20 nt, synthetic construct
  misc_feature 1..20: note = synthesized
  source 1..20: mol_type = other RNA
tggacctggaagtactggaa

SEQ ID NO: 1050 - RNA, 20 nt, synthetic construct
  misc_feature 1..20: note = synthesized
  source 1..20: mol_type = other RNA
tggacctggaagtgctggaa

SEQ ID NO: 1051 - RNA, 20 nt, synthetic construct
  misc_feature 1..20: note = synthesized
  source 1..20: mol_type = other RNA
ttccagcacttccaggtcca

SEQ ID NO: 1052 - RNA, 20 nt, synthetic construct
  misc_feature 1..20: note = synthesized
  source 1..20: mol_type = other RNA
ttccagtacttccaggtcca

SEQ ID NO: 1053 - RNA, 20 nt, synthetic construct
  misc_feature 1..20: note = synthesized
  source 1..20: mol_type = other RNA
aaagcttcctgaggccaaga

SEQ ID NO: 1054 - RNA, 20 nt, synthetic construct
  misc_feature 1..20: note = synthesized
  source 1..20: mol_type = other RNA
aaagcttcctgaggccaagg

SEQ ID NO: 1055 - RNA, 20 nt, synthetic construct
  misc_feature 1..20: note = synthesized
  source 1..20: mol_type = other RNA
aagacacaaggactggcaca

SEQ ID NO: 1056 - RNA, 20 nt, synthetic construct
  misc_feature 1..20: note = synthesized
  source 1..20: mol_type = other RNA
aagcttcctgaggccaagac

SEQ ID NO: 1057 - RNA, 20 nt, synthetic construct
  misc_feature 1..20: note = synthesized
  source 1..20: mol_type = other RNA
aagcttcctgaggccaaggc

SEQ ID NO: 1058 - RNA, 20 nt, synthetic construct
  misc_feature 1..20: note = synthesized
  source 1..20: mol_type = other RNA
aaggcacaaggactggcaca

SEQ ID NO: 1059 - RNA, 20 nt, synthetic construct
  misc_feature 1..20: note = synthesized
  source 1..20: mol_type = other RNA
acacaaggactggcacaaat

SEQ ID NO: 1060 - RNA, 20 nt, synthetic construct
  misc_feature 1..20: note = synthesized
  source 1..20: mol_type = other RNA
agacacaaggactggcacaa

SEQ ID NO: 1061 - RNA, 20 nt, synthetic construct
  misc_feature 1..20: note = synthesized
  source 1..20: mol_type = other RNA
agcttcctgaggccaagaca

SEQ ID NO: 1062 - RNA, 20 nt, synthetic construct
  misc_feature 1..20: note = synthesized
  source 1..20: mol_type = other RNA
agcttcctgaggccaaggca

SEQ ID NO: 1063 - RNA, 20 nt, synthetic construct
  misc_feature 1..20: note = synthesized
  source 1..20: mol_type = other RNA
aggcacaaggactggcacaa

SEQ ID NO: 1064 - RNA, 20 nt, synthetic construct
  misc_feature 1..20: note = synthesized
  source 1..20: mol_type = other RNA
aggccaagacacaaggactg

SEQ ID NO: 1065 - RNA, 20 nt, synthetic construct
  misc_feature 1..20: note = synthesized
  source 1..20: mol_type = other RNA
aggccaaggcacaaggactg

SEQ ID NO: 1066 - RNA, 20 nt, synthetic construct
  misc_feature 1..20: note = synthesized
  source 1..20: mol_type = other RNA
caagacacaaggactggcac

SEQ ID NO: 1067 - RNA, 20 nt, synthetic construct
  misc_feature 1..20: note = synthesized
  source 1..20: mol_type = other RNA
caaggcacaaggactggcac

SEQ ID NO: 1068 - RNA, 20 nt, synthetic construct
  misc_feature 1..20: note = synthesized
  source 1..20: mol_type = other RNA
cagtccttgtgccttggcct

SEQ ID NO: 1069 - RNA, 20 nt, synthetic construct
  misc_feature 1..20: note = synthesized
  source 1..20: mol_type = other RNA
cagtccttgtgtcttggcct

SEQ ID NO: 1070 - RNA, 20 nt, synthetic construct
  misc_feature 1..20: note = synthesized
  source 1..20: mol_type = other RNA
ccaagacacaaggactggca

SEQ ID NO: 1071 - RNA, 20 nt, synthetic construct
  misc_feature 1..20: note = synthesized
  source 1..20: mol_type = other RNA
ccaaggcacaaggactggca

SEQ ID NO: 1072 - RNA, 20 nt, synthetic construct
  misc_feature 1..20: note = synthesized
  source 1..20: mol_type = other RNA
ccagtccttgtgccttggcc

SEQ ID NO: 1073 - RNA, 20 nt, synthetic construct
  misc_feature 1..20: note = synthesized
  source 1..20: mol_type = other RNA
ccagtccttgtgtcttggcc

SEQ ID NO: 1074 - RNA, 20 nt, synthetic construct
  misc_feature 1..20: note = synthesized
  source 1..20: mol_type = other RNA
ccttggcctcaggaagcttt

SEQ ID NO: 1075 - RNA, 20 nt, synthetic construct
  misc_feature 1..20: note = synthesized
  source 1..20: mol_type = other RNA
ccttgtgccttggcctcagg

SEQ ID NO: 1076 - RNA, 20 nt, synthetic construct
  misc_feature 1..20: note = synthesized
  source 1..20: mol_type = other RNA
ccttgtgtcttggcctcagg

SEQ ID NO: 1077 - RNA, 20 nt, synthetic construct
  misc_feature 1..20: note = synthesized
  source 1..20: mol_type = other RNA
ctgaggccaagacacaagga

SEQ ID NO: 1078 - RNA, 20 nt, synthetic construct
  misc_feature 1..20: note = synthesized
  source 1..20: mol_type = other RNA
ctgaggccaaggcacaagga

SEQ ID NO: 1079 - RNA, 20 nt, synthetic construct
  misc_feature 1..20: note = synthesized
  source 1..20: mol_type = other RNA
cttgtgccttggcctcagga

SEQ ID NO: 1080 - RNA, 20 nt, synthetic construct
  misc_feature 1..20: note = synthesized
  source 1..20: mol_type = other RNA
cttgtgtcttggcctcagga

SEQ ID NO: 1081 - RNA, 20 nt, synthetic construct
  misc_feature 1..20: note = synthesized
  source 1..20: mol_type = other RNA
gacacaaggactggcacaaa

SEQ ID NO: 1082 - RNA, 20 nt, synthetic construct
  misc_feature 1..20: note = synthesized
  source 1..20: mol_type = other RNA
gaggccaagacacaaggact

SEQ ID NO: 1083 - RNA, 20 nt, synthetic construct
  misc_feature 1..20: note = synthesized
  source 1..20: mol_type = other RNA
gaggccaaggcacaaggact

SEQ ID NO: 1084 - RNA, 20 nt, synthetic construct
  misc_feature 1..20: note = synthesized
  source 1..20: mol_type = other RNA
gcacaaggactggcacaaat

SEQ ID NO: 1085 - RNA, 20 nt, synthetic construct
  misc_feature 1..20: note = synthesized
  source 1..20: mol_type = other RNA
gccaagacacaaggactggc

SEQ ID NO: 1086 - RNA, 20 nt, synthetic construct
  misc_feature 1..20: note = synthesized
  source 1..20: mol_type = other RNA
gccaaggcacaaggactggc

SEQ ID NO: 1087 - RNA, 20 nt, synthetic construct
  misc_feature 1..20: note = synthesized
  source 1..20: mol_type = other RNA
gccagtccttgtgccttggc

SEQ ID NO: 1088 - RNA, 20 nt, synthetic construct
  misc_feature 1..20: note = synthesized
  source 1..20: mol_type = other RNA
gccagtccttgtgtcttggc

SEQ ID NO: 1089 - RNA, 20 nt, synthetic construct
  misc_feature 1..20: note = synthesized
  source 1..20: mol_type = other RNA
gcttcctgaggccaagacac

SEQ ID NO: 1090 - RNA, 20 nt, synthetic construct
  misc_feature 1..20: note = synthesized
  source 1..20: mol_type = other RNA
gcttcctgaggccaaggcac

SEQ ID NO: 1091 - RNA, 20 nt, synthetic construct
  misc_feature 1..20: note = synthesized
  source 1..20: mol_type = other RNA
ggcacaaggactggcacaaa

SEQ ID NO: 1092 - RNA, 20 nt, synthetic construct
  misc_feature 1..20: note = synthesized
  source 1..20: mol_type = other RNA
ggccaagacacaaggactgg

SEQ ID NO: 1093 - RNA, 20 nt, synthetic construct
  misc_feature 1..20: note = synthesized
  source 1..20: mol_type = other RNA
ggccaaggcacaaggactgg

SEQ ID NO: 1094 - RNA, 20 nt, synthetic construct
  misc_feature 1..20: note = synthesized
  source 1..20: mol_type = other RNA
gtgccagtccttgtgccttg

SEQ ID NO: 1095 - RNA, 20 nt, synthetic construct
  misc_feature 1..20: note = synthesized
  source 1..20: mol_type = other RNA
gtgccagtccttgtgtcttg

SEQ ID NO: 1096 - RNA, 20 nt, synthetic construct
  misc_feature 1..20: note = synthesized
  source 1..20: mol_type = other RNA
gtgccttggcctcaggaagc

SEQ ID NO: 1097 - RNA, 20 nt, synthetic construct
  misc_feature 1..20: note = synthesized
  source 1..20: mol_type = other RNA
gtgtcttggcctcaggaagc

SEQ ID NO: 1098 - RNA, 20 nt, synthetic construct
  misc_feature 1..20: note = synthesized
  source 1..20: mol_type = other RNA
tcctgaggccaagacacaag

SEQ ID NO: 1099 - RNA, 20 nt, synthetic construct
  misc_feature 1..20: note = synthesized
  source 1..20: mol_type = other RNA
tcctgaggccaaggcacaag

SEQ ID NO: 1100 - RNA, 20 nt, synthetic construct
  misc_feature 1..20: note = synthesized
  source 1..20: mol_type = other RNA
tccttgtgccttggcctcag

SEQ ID NO: 1101 - RNA, 20 nt, synthetic construct
  misc_feature 1..20: note = synthesized
  source 1..20: mol_type = other RNA
tccttgtgtcttggcctcag

SEQ ID NO: 1102 - RNA, 20 nt, synthetic construct
  misc_feature 1..20: note = synthesized
  source 1..20: mol_type = other RNA
tcttggcctcaggaagcttt

SEQ ID NO: 1103 - RNA, 20 nt, synthetic construct
  misc_feature 1..20: note = synthesized
  source 1..20: mol_type = other RNA
tgccagtccttgtgccttgg

SEQ ID NO: 1104 - RNA, 20 nt, synthetic construct
  misc_feature 1..20: note = synthesized
  source 1..20: mol_type = other RNA
tgccagtccttgtgtcttgg

SEQ ID NO: 1105 - RNA, 20 nt, synthetic construct
  misc_feature 1..20: note = synthesized
  source 1..20: mol_type = other RNA
tgccttggcctcaggaagct

SEQ ID NO: 1106 - RNA, 20 nt, synthetic construct
  misc_feature 1..20: note = synthesized
  source 1..20: mol_type = other RNA
tgtcttggcctcaggaagct

SEQ ID NO: 1107 - RNA, 20 nt, synthetic construct
  misc_feature 1..20: note = synthesized
  source 1..20: mol_type = other RNA
tgtgccagtccttgtgcctt

SEQ ID NO: 1108 - RNA, 20 nt, synthetic construct
  misc_feature 1..20: note = synthesized
  source 1..20: mol_type = other RNA
tgtgccagtccttgtgtctt

SEQ ID NO: 1109 - RNA, 20 nt, synthetic construct
  misc_feature 1..20: note = synthesized
  source 1..20: mol_type = other RNA
tgtgccttggcctcaggaag

SEQ ID NO: 1110 - RNA, 20 nt, synthetic construct
  misc_feature 1..20: note = synthesized
  source 1..20: mol_type = other RNA
tgtgtcttggcctcaggaag

SEQ ID NO: 1111 - RNA, 20 nt, synthetic construct
  misc_feature 1..20: note = synthesized
  source 1..20: mol_type = other RNA
ttgtgccttggcctcaggaa

SEQ ID NO: 1112 - RNA, 20 nt, synthetic construct
  misc_feature 1..20: note = synthesized
  source 1..20: mol_type = other RNA
ttgtgtcttggcctcaggaa

SEQ ID NO: 1113 - RNA, 20 nt, synthetic construct
  misc_feature 1..20: note = synthesized
  source 1..20: mol_type = other RNA
tttgtgccagtccttgtgcc

SEQ ID NO: 1114 - RNA, 20 nt, synthetic construct
  misc_feature 1..20: note = synthesized
  source 1..20: mol_type = other RNA
tttgtgccagtccttgtgtc

SEQ ID NO: 1115 - RNA, 20 nt, synthetic construct
  misc_feature 1..20: note = synthesized
  source 1..20: mol_type = other RNA
aacaaataaagaaaaggaac

SEQ ID NO: 1116 - RNA, 20 nt, synthetic construct
  misc_feature 1..20: note = synthesized
  source 1..20: mol_type = other RNA
aatagttacctacataacaa

SEQ ID NO: 1117 - RNA, 20 nt, synthetic construct
  misc_feature 1..20: note = synthesized
  source 1..20: mol_type = other RNA
aatagttacctacatagcaa

SEQ ID NO: 1118 - RNA, 20 nt, synthetic construct
  misc_feature 1..20: note = synthesized
  source 1..20: mol_type = other RNA
acaaataaagaaaaggaacc

SEQ ID NO: 1119 - RNA, 20 nt, synthetic construct
  misc_feature 1..20: note = synthesized
  source 1..20: mol_type = other RNA
acataacaaataaagaaaag

SEQ ID NO: 1120 - RNA, 20 nt, synthetic construct
  misc_feature 1..20: note = synthesized
  source 1..20: mol_type = other RNA
acatagcaaataaagaaaag

SEQ ID NO: 1121 - RNA, 20 nt, synthetic construct
  misc_feature 1..20: note = synthesized
  source 1..20: mol_type = other RNA
acctacataacaaataaaga

SEQ ID NO: 1122 - RNA, 20 nt, synthetic construct
  misc_feature 1..20: note = synthesized
  source 1..20: mol_type = other RNA
acctacatagcaaataaaga

SEQ ID NO: 1123 - RNA, 20 nt, synthetic construct
  misc_feature 1..20: note = synthesized
  source 1..20: mol_type = other RNA
agcaaataaagaaaaggaac

SEQ ID NO: 1124 - RNA, 20 nt, synthetic construct
  misc_feature 1..20: note = synthesized
  source 1..20: mol_type = other RNA
agttacctacataacaaata

SEQ ID NO: 1125 - RNA, 20 nt, synthetic construct
  misc_feature 1..20: note = synthesized
  source 1..20: mol_type = other RNA
agttacctacatagcaaata

SEQ ID NO: 1126 - RNA, 20 nt, synthetic construct
  misc_feature 1..20: note = synthesized
  source 1..20: mol_type = other RNA
ataacaaataaagaaaagga

SEQ ID NO: 1127 - RNA, 20 nt, synthetic construct
  misc_feature 1..20: note = synthesized
  source 1..20: mol_type = other RNA
atagcaaataaagaaaagga

SEQ ID NO: 1128 - RNA, 20 nt, synthetic construct
  misc_feature 1..20: note = synthesized
  source 1..20: mol_type = other RNA
atagttacctacataacaaa

SEQ ID NO: 1129 - RNA, 20 nt, synthetic construct
  misc_feature 1..20: note = synthesized
  source 1..20: mol_type = other RNA
atagttacctacatagcaaa

SEQ ID NO: 1130 - RNA, 20 nt, synthetic construct
  misc_feature 1..20: note = synthesized
  source 1..20: mol_type = other RNA
atttgctatgtaggtaacta

SEQ ID NO: 1131 - RNA, 20 nt, synthetic construct
  misc_feature 1..20: note = synthesized
  source 1..20: mol_type = other RNA
atttgttatgtaggtaacta

SEQ ID NO: 1132 - RNA, 20 nt, synthetic construct
  misc_feature 1..20: note = synthesized
  source 1..20: mol_type = other RNA
cataacaaataaagaaaagg

SEQ ID NO: 1133 - RNA, 20 nt, synthetic construct
  misc_feature 1..20: note = synthesized
  source 1..20: mol_type = other RNA
catagcaaataaagaaaagg

SEQ ID NO: 1134 - RNA, 20 nt, synthetic construct
  misc_feature 1..20: note = synthesized
  source 1..20: mol_type = other RNA
cctacataacaaataaagaa

SEQ ID NO: 1135 - RNA, 20 nt, synthetic construct
  misc_feature 1..20: note = synthesized
  source 1..20: mol_type = other RNA
cctacatagcaaataaagaa

SEQ ID NO: 1136 - RNA, 20 nt, synthetic construct
  misc_feature 1..20: note = synthesized
  source 1..20: mol_type = other RNA
ccttttctttatttgctatg

SEQ ID NO: 1137 - RNA, 20 nt, synthetic construct
  misc_feature 1..20: note = synthesized
  source 1..20: mol_type = other RNA
ccttttctttatttgttatg

SEQ ID NO: 1138 - RNA, 20 nt, synthetic construct
  misc_feature 1..20: note = synthesized
  source 1..20: mol_type = other RNA
ctatgtaggtaactattcaa

SEQ ID NO: 1139 - RNA, 20 nt, synthetic construct
  misc_feature 1..20: note = synthesized
  source 1..20: mol_type = other RNA
ctttatttgctatgtaggta

SEQ ID NO: 1140 - RNA, 20 nt, synthetic construct
  misc_feature 1..20: note = synthesized
  source 1..20: mol_type = other RNA
ctttatttgttatgtaggta

SEQ ID NO: 1141 - RNA, 20 nt, synthetic construct
  misc_feature 1..20: note = synthesized
  source 1..20: mol_type = other RNA
gaatagttacctacataaca

SEQ ID NO: 1142 - RNA, 20 nt, synthetic construct
  misc_feature 1..20: note = synthesized
  source 1..20: mol_type = other RNA
gaatagttacctacatagca

SEQ ID NO: 1143 - RNA, 20 nt, synthetic construct
  misc_feature 1..20: note = synthesized
  source 1..20: mol_type = other RNA
gcaaataaagaaaaggaacc

SEQ ID NO: 1144 - RNA, 20 nt, synthetic construct
  misc_feature 1..20: note = synthesized
  source 1..20: mol_type = other RNA
gctatgtaggtaactattca

SEQ ID NO: 1145 - RNA, 20 nt, synthetic construct
  misc_feature 1..20: note = synthesized
  source 1..20: mol_type = other RNA
ggttccttttctttatttgc

SEQ ID NO: 1146 - RNA, 20 nt, synthetic construct
  misc_feature 1..20: note = synthesized
  source 1..20: mol_type = other RNA
ggttccttttctttatttgt

SEQ ID NO: 1147 - RNA, 20 nt, synthetic construct
  misc_feature 1..20: note = synthesized
  source 1..20: mol_type = other RNA
gttatgtaggtaactattca

SEQ ID NO: 1148 - RNA, 20 nt, synthetic construct
  misc_feature 1..20: note = synthesized
  source 1..20: mol_type = other RNA
gttccttttctttatttgct

SEQ ID NO: 1149 - RNA, 20 nt, synthetic construct
  misc_feature 1..20: note = synthesized
  source 1..20: mol_type = other RNA
gttccttttctttatttgtt

SEQ ID NO: 1150 - RNA, 20 nt, synthetic construct
  misc_feature 1..20: note = synthesized
  source 1..20: mol_type = other RNA
taacaaataaagaaaaggaa

SEQ ID NO: 1151 - RNA, 20 nt, synthetic construct
  misc_feature 1..20: note = synthesized
  source 1..20: mol_type = other RNA
tacataacaaataaagaaaa

SEQ ID NO: 1152 - RNA, 20 nt, synthetic construct
  misc_feature 1..20: note = synthesized
  source 1..20: mol_type = other RNA
tacctacataacaaataaag

SEQ ID NO: 1153 - RNA, 20 nt, synthetic construct
  misc_feature 1..20: note = synthesized
  source 1..20: mol_type = other RNA
tacctacatagcaaataaag

SEQ ID NO: 1154 - RNA, 20 nt, synthetic construct
  misc_feature 1..20: note = synthesized
  source 1..20: mol_type = other RNA
tagcaaataaagaaaaggaa

SEQ ID NO: 1155 - RNA, 20 nt, synthetic construct
  misc_feature 1..20: note = synthesized
  source 1..20: mol_type = other RNA
tagttacctacataacaaat

SEQ ID NO: 1156 - RNA, 20 nt, synthetic construct
  misc_feature 1..20: note = synthesized
  source 1..20: mol_type = other RNA
tagttacctacatagcaaat

SEQ ID NO: 1157 - RNA, 20 nt, synthetic construct
  misc_feature 1..20: note = synthesized
  source 1..20: mol_type = other RNA
tatttgctatgtaggtaact

SEQ ID NO: 1158 - RNA, 20 nt, synthetic construct
  misc_feature 1..20: note = synthesized
  source 1..20: mol_type = other RNA
tatttgttatgtaggtaact

SEQ ID NO: 1159 - RNA, 20 nt, synthetic construct
  misc_feature 1..20: note = synthesized
  source 1..20: mol_type = other RNA
tctttatttgctatgtaggt

SEQ ID NO: 1160 - RNA, 20 nt, synthetic construct
  misc_feature 1..20: note = synthesized
  source 1..20: mol_type = other RNA
tctttatttgttatgtaggt

SEQ ID NO: 1161 - RNA, 20 nt, synthetic construct
  misc_feature 1..20: note = synthesized
  source 1..20: mol_type = other RNA
tgaatagttacctacataac

SEQ ID NO: 1162 - RNA, 20 nt, synthetic construct
  misc_feature 1..20: note = synthesized
  source 1..20: mol_type = other RNA
tgaatagttacctacatagc

SEQ ID NO: 1163 - RNA, 20 nt, synthetic construct
  misc_feature 1..20: note = synthesized
  source 1..20: mol_type = other RNA
tgctatgtaggtaactattc

SEQ ID NO: 1164 - RNA, 20 nt, synthetic construct
  misc_feature 1..20: note = synthesized
  source 1..20: mol_type = other RNA
tgttatgtaggtaactattc

SEQ ID NO: 1165 - RNA, 20 nt, synthetic construct
  misc_feature 1..20: note = synthesized
  source 1..20: mol_type = other RNA
ttacctacataacaaataaa

SEQ ID NO: 1166 - RNA, 20 nt, synthetic construct
  misc_feature 1..20: note = synthesized
  source 1..20: mol_type = other RNA
ttacctacatagcaaataaa

SEQ ID NO: 1167 - RNA, 20 nt, synthetic construct
  misc_feature 1..20: note = synthesized
  source 1..20: mol_type = other RNA
ttatgtaggtaactattcaa

SEQ ID NO: 1168 - RNA, 20 nt, synthetic construct
  misc_feature 1..20: note = synthesized
  source 1..20: mol_type = other RNA
ttatttgctatgtaggtaac

SEQ ID NO: 1169 - RNA, 20 nt, synthetic construct
  misc_feature 1..20: note = synthesized
  source 1..20: mol_type = other RNA
ttatttgttatgtaggtaac

SEQ ID NO: 1170 - RNA, 20 nt, synthetic construct
  misc_feature 1..20: note = synthesized
  source 1..20: mol_type = other RNA
ttccttttctttatttgcta

SEQ ID NO: 1171 - RNA, 20 nt, synthetic construct
  misc_feature 1..20: note = synthesized
  source 1..20: mol_type = other RNA
ttccttttctttatttgtta

SEQ ID NO: 1172 - RNA, 20 nt, synthetic construct
  misc_feature 1..20: note = synthesized
  source 1..20: mol_type = other RNA
ttctttatttgctatgtagg

SEQ ID NO: 1173 - RNA, 20 nt, synthetic construct
  misc_feature 1..20: note = synthesized
  source 1..20: mol_type = other RNA
ttctttatttgttatgtagg

SEQ ID NO: 1174 - RNA, 20 nt, synthetic construct
  misc_feature 1..20: note = synthesized
  source 1..20: mol_type = other RNA
ttgaatagttacctacataa

SEQ ID NO: 1175 - RNA, 20 nt, synthetic construct
  misc_feature 1..20: note = synthesized
  source 1..20: mol_type = other RNA
ttgaatagttacctacatag

SEQ ID NO: 1176 - RNA, 20 nt, synthetic construct
  misc_feature 1..20: note = synthesized
  source 1..20: mol_type = other RNA
ttgctatgtaggtaactatt

SEQ ID NO: 1177 - RNA, 20 nt, synthetic construct
  misc_feature 1..20: note = synthesized
  source 1..20: mol_type = other RNA
ttgttatgtaggtaactatt

SEQ ID NO: 1178 - RNA, 20 nt, synthetic construct
  misc_feature 1..20: note = synthesized
  source 1..20: mol_type = other RNA
tttatttgctatgtaggtaa

SEQ ID NO: 1179 - RNA, 20 nt, synthetic construct
  misc_feature 1..20: note = synthesized
  source 1..20: mol_type = other RNA
tttatttgttatgtaggtaa

SEQ ID NO: 1180 - RNA, 20 nt, synthetic construct
  misc_feature 1..20: note = synthesized
  source 1..20: mol_type = other RNA
tttctttatttgctatgtag

SEQ ID NO: 1181 - RNA, 20 nt, synthetic construct
  misc_feature 1..20: note = synthesized
  source 1..20: mol_type = other RNA
tttctttatttgttatgtag

SEQ ID NO: 1182 - RNA, 20 nt, synthetic construct
  misc_feature 1..20: note = synthesized
  source 1..20: mol_type = other RNA
tttgctatgtaggtaactat

SEQ ID NO: 1183 - RNA, 20 nt, synthetic construct
  misc_feature 1..20: note = synthesized
  source 1..20: mol_type = other RNA
tttgttatgtaggtaactat

SEQ ID NO: 1184 - RNA, 20 nt, synthetic construct
  misc_feature 1..20: note = synthesized
  source 1..20: mol_type = other RNA
ttttctttatttgctatgta

SEQ ID NO: 1185 - RNA, 20 nt, synthetic construct
  misc_feature 1..20: note = synthesized
  source 1..20: mol_type = other RNA
ttttctttatttgttatgta

SEQ ID NO: 1186 - RNA, 20 nt, synthetic construct
  misc_feature 1..20: note = synthesized
  source 1..20: mol_type = other RNA
aacttctcttcccataccac

SEQ ID NO: 1187 - RNA, 20 nt, synthetic construct
  misc_feature 1..20: note = synthesized
  source 1..20: mol_type = other RNA
aacttctcttcctataccac

SEQ ID NO: 1188 - RNA, 20 nt, synthetic construct
  misc_feature 1..20: note = synthesized
  source 1..20: mol_type = other RNA
agaacttctcttcccatacc

SEQ ID NO: 1189 - RNA, 20 nt, synthetic construct
  misc_feature 1..20: note = synthesized
  source 1..20: mol_type = other RNA
agaacttctcttcctatacc

SEQ ID NO: 1190 - RNA, 20 nt, synthetic construct
  misc_feature 1..20: note = synthesized
  source 1..20: mol_type = other RNA
aggaagagaagttctcaaac

SEQ ID NO: 1191 - RNA, 20 nt, synthetic construct
  misc_feature 1..20: note = synthesized
  source 1..20: mol_type = other RNA
atgattttgggtggtatagg

SEQ ID NO: 1192 - RNA, 20 nt, synthetic construct
  misc_feature 1..20: note = synthesized
  source 1..20: mol_type = other RNA
atgattttgggtggtatggg

SEQ ID NO: 1193 - RNA, 20 nt, synthetic construct
  misc_feature 1..20: note = synthesized
  source 1..20: mol_type = other RNA
cataccacccaaaatcataa

SEQ ID NO: 1194 - RNA, 20 nt, synthetic construct
  misc_feature 1..20: note = synthesized
  source 1..20: mol_type = other RNA
ccataccacccaaaatcata

SEQ ID NO: 1195 - RNA, 20 nt, synthetic construct
  misc_feature 1..20: note = synthesized
  source 1..20: mol_type = other RNA
cccataccacccaaaatcat

SEQ ID NO: 1196 - RNA, 20 nt, synthetic construct
  misc_feature 1..20: note = synthesized
  source 1..20: mol_type = other RNA
cctataccacccaaaatcat

SEQ ID NO: 1197 - RNA, 20 nt, synthetic construct
  misc_feature 1..20: note = synthesized
  source 1..20: mol_type = other RNA
ctataccacccaaaatcata

SEQ ID NO: 1198 - RNA, 20 nt, synthetic construct
  misc_feature 1..20: note = synthesized
  source 1..20: mol_type = other RNA
ctcttcccataccacccaaa

SEQ ID NO: 1199 - RNA, 20 nt, synthetic construct
  misc_feature 1..20: note = synthesized
  source 1..20: mol_type = other RNA
ctcttcctataccacccaaa

SEQ ID NO: 1200 - RNA, 20 nt, synthetic construct
  misc_feature 1..20: note = synthesized
  source 1..20: mol_type = other RNA
cttcccataccacccaaaat

SEQ ID NO: 1201 - RNA, 20 nt, synthetic construct
  misc_feature 1..20: note = synthesized
  source 1..20: mol_type = other RNA
cttcctataccacccaaaat

SEQ ID NO: 1202 - RNA, 20 nt, synthetic construct
  misc_feature 1..20: note = synthesized
  source 1..20: mol_type = other RNA
cttctcttcccataccaccc

SEQ ID NO: 1203 - RNA, 20 nt, synthetic construct
  misc_feature 1..20: note = synthesized
  source 1..20: mol_type = other RNA
cttctcttcctataccaccc

SEQ ID NO: 1204 - RNA, 20 nt, synthetic construct
  misc_feature 1..20: note = synthesized
  source 1..20: mol_type = other RNA
gaacttctcttcccatacca

SEQ ID NO: 1205 - RNA, 20 nt, synthetic construct
  misc_feature 1..20: note = synthesized
  source 1..20: mol_type = other RNA
gaacttctcttcctatacca

SEQ ID NO: 1206 - RNA, 20 nt, synthetic construct
  misc_feature 1..20: note = synthesized
  source 1..20: mol_type = other RNA
gagaacttctcttcccatac

SEQ ID NO: 1207 - RNA, 20 nt, synthetic construct
  misc_feature 1..20: note = synthesized
  source 1..20: mol_type = other RNA
gagaacttctcttcctatac

SEQ ID NO: 1208 - RNA, 20 nt, synthetic construct
  misc_feature 1..20: note = synthesized
  source 1..20: mol_type = other RNA
gattttgggtggtataggaa

SEQ ID NO: 1209 - RNA, 20 nt, synthetic construct
  misc_feature 1..20: note = synthesized
  source 1..20: mol_type = other RNA
gattttgggtggtatgggaa

SEQ ID NO: 1210 - RNA, 20 nt, synthetic construct
  misc_feature 1..20: note = synthesized
  source 1..20: mol_type = other RNA
gggaagagaagttctcaaac

SEQ ID NO: 1211 - RNA, 20 nt, synthetic construct
  misc_feature 1..20: note = synthesized
  source 1..20: mol_type = other RNA
gggtggtataggaagagaag

SEQ ID NO: 1212 - RNA, 20 nt, synthetic construct
  misc_feature 1..20: note = synthesized
  source 1..20: mol_type = other RNA
gggtggtatgggaagagaag

SEQ ID NO: 1213 - RNA, 20 nt, synthetic construct
  misc_feature 1..20: note = synthesized
  source 1..20: mol_type = other RNA
ggtataggaagagaagttct

SEQ ID NO: 1214 - RNA, 20 nt, synthetic construct
  misc_feature 1..20: note = synthesized
  source 1..20: mol_type = other RNA
ggtatgggaagagaagttct

SEQ ID NO: 1215 - RNA, 20 nt, synthetic construct
  misc_feature 1..20: note = synthesized
  source 1..20: mol_type = other RNA
ggtggtataggaagagaagt

SEQ ID NO: 1216 - RNA, 20 nt, synthetic construct
  misc_feature 1..20: note = synthesized
  source 1..20: mol_type = other RNA
ggtggtatgggaagagaagt

SEQ ID NO: 1217 - RNA, 20 nt, synthetic construct
  misc_feature 1..20: note = synthesized
  source 1..20: mol_type = other RNA
gtataggaagagaagttctc

SEQ ID NO: 1218 - RNA, 20 nt, synthetic construct
  misc_feature 1..20: note = synthesized
  source 1..20: mol_type = other RNA
gtatgggaagagaagttctc

SEQ ID NO: 1219 - RNA, 20 nt, synthetic construct
  misc_feature 1..20: note = synthesized
  source 1..20: mol_type = other RNA
gtggtataggaagagaagtt

SEQ ID NO: 1220 - RNA, 20 nt, synthetic construct
  misc_feature 1..20: note = synthesized
  source 1..20: mol_type = other RNA
gtggtatgggaagagaagtt

SEQ ID NO: 1221 - RNA, 20 nt, synthetic construct
  misc_feature 1..20: note = synthesized
  source 1..20: mol_type = other RNA
gtttgagaacttctcttccc

SEQ ID NO: 1222 - RNA, 20 nt, synthetic construct
  misc_feature 1..20: note = synthesized
  source 1..20: mol_type = other RNA
gtttgagaacttctcttcct

SEQ ID NO: 1223 - RNA, 20 nt, synthetic construct
  misc_feature 1..20: note = synthesized
  source 1..20: mol_type = other RNA
taggaagagaagttctcaaa

SEQ ID NO: 1224 - RNA, 20 nt, synthetic construct
  misc_feature 1..20: note = synthesized
  source 1..20: mol_type = other RNA
tataccacccaaaatcataa

SEQ ID NO: 1225 - RNA, 20 nt, synthetic construct
  misc_feature 1..20: note = synthesized
  source 1..20: mol_type = other RNA
tataggaagagaagttctca

SEQ ID NO: 1226 - RNA, 20 nt, synthetic construct
  misc_feature 1..20: note = synthesized
  source 1..20: mol_type = other RNA
tatgattttgggtggtatag

SEQ ID NO: 1227 - RNA, 20 nt, synthetic construct
  misc_feature 1..20: note = synthesized
  source 1..20: mol_type = other RNA
tatgattttgggtggtatgg

SEQ ID NO: 1228 - RNA, 20 nt, synthetic construct
  misc_feature 1..20: note = synthesized
  source 1..20: mol_type = other RNA
tatgggaagagaagttctca

SEQ ID NO: 1229 - RNA, 20 nt, synthetic construct
  misc_feature 1..20: note = synthesized
  source 1..20: mol_type = other RNA
tcccataccacccaaaatca

SEQ ID NO: 1230 - RNA, 20 nt, synthetic construct
  misc_feature 1..20: note = synthesized
  source 1..20: mol_type = other RNA
tcctataccacccaaaatca

SEQ ID NO: 1231 - RNA, 20 nt, synthetic construct
  misc_feature 1..20: note = synthesized
  source 1..20: mol_type = other RNA
tcttcccataccacccaaaa

SEQ ID NO: 1232 - RNA, 20 nt, synthetic construct
  misc_feature 1..20: note = synthesized
  source 1..20: mol_type = other RNA
tcttcctataccacccaaaa

SEQ ID NO: 1233 - RNA, 20 nt, synthetic construct
  misc_feature 1..20: note = synthesized
  source 1..20: mol_type = other RNA
tgagaacttctcttcccata

SEQ ID NO: 1234 - RNA, 20 nt, synthetic construct
  misc_feature 1..20: note = synthesized
  source 1..20: mol_type = other RNA
tgagaacttctcttcctata

SEQ ID NO: 1235 - RNA, 20 nt, synthetic construct
  misc_feature 1..20: note = synthesized
  source 1..20: mol_type = other RNA
tgggaagagaagttctcaaa

SEQ ID NO: 1236 - RNA, 20 nt, synthetic construct
  misc_feature 1..20: note = synthesized
  source 1..20: mol_type = other RNA
tgggtggtataggaagagaa

SEQ ID NO: 1237 - RNA, 20 nt, synthetic construct
  misc_feature 1..20: note = synthesized
  source 1..20: mol_type = other RNA
tgggtggtatgggaagagaa

SEQ ID NO: 1238 - RNA, 20 nt, synthetic construct
  misc_feature 1..20: note = synthesized
  source 1..20: mol_type = other RNA
ttcccataccacccaaaatc

SEQ ID NO: 1239 - RNA, 20 nt, synthetic construct
  misc_feature 1..20: note = synthesized
  source 1..20: mol_type = other RNA
ttcctataccacccaaaatc

SEQ ID NO: 1240 - RNA, 20 nt, synthetic construct
  misc_feature 1..20: note = synthesized
  source 1..20: mol_type = other RNA
ttctcttcccataccaccca

SEQ ID NO: 1241 - RNA, 20 nt, synthetic construct
  misc_feature 1..20: note = synthesized
  source 1..20: mol_type = other RNA
ttctcttcctataccaccca

SEQ ID NO: 1242 - RNA, 20 nt, synthetic construct
  misc_feature 1..20: note = synthesized
  source 1..20: mol_type = other RNA
ttgagaacttctcttcccat

SEQ ID NO: 1243 - RNA, 20 nt, synthetic construct
  misc_feature 1..20: note = synthesized
  source 1..20: mol_type = other RNA
ttgagaacttctcttcctat

SEQ ID NO: 1244 - RNA, 20 nt, synthetic construct
  misc_feature 1..20: note = synthesized
  source 1..20: mol_type = other RNA
ttgggtggtataggaagaga

SEQ ID NO: 1245 - RNA, 20 nt, synthetic construct
  misc_feature 1..20: note = synthesized
  source 1..20: mol_type = other RNA
ttgggtggtatgggaagaga

SEQ ID NO: 1246 - RNA, 20 nt, synthetic construct
  misc_feature 1..20: note = synthesized
  source 1..20: mol_type = other RNA
tttgggtggtataggaagag

SEQ ID NO: 1247 - RNA, 20 nt, synthetic construct
  misc_feature 1..20: note = synthesized
  source 1..20: mol_type = other RNA
tttgggtggtatgggaagag

SEQ ID NO: 1248 - RNA, 20 nt, synthetic construct
  misc_feature 1..20: note = synthesized
  source 1..20: mol_type = other RNA
ttttgggtggtataggaaga

SEQ ID NO: 1249 - RNA, 20 nt, synthetic construct
  misc_feature 1..20: note = synthesized
  source 1..20: mol_type = other RNA
ttttgggtggtatgggaaga

SEQ ID NO: 1250 - RNA, 20 nt, synthetic construct
  misc_feature 1..20: note = synthesized
  source 1..20: mol_type = other RNA
aaaaagccaatgcacggcag

SEQ ID NO: 1251 - RNA, 20 nt, synthetic construct
  misc_feature 1..20: note = synthesized
  source 1..20: mol_type = other RNA
aaaaagccaatgcatggcag

SEQ ID NO: 1252 - RNA, 20 nt, synthetic construct
  misc_feature 1..20: note = synthesized
  source 1..20: mol_type = other RNA
aaaagccaatgcacggcaga

SEQ ID NO: 1253 - RNA, 20 nt, synthetic construct
  misc_feature 1..20: note = synthesized
  source 1..20: mol_type = other RNA
aaaagccaatgcatggcaga

SEQ ID NO: 1254 - RNA, 20 nt, synthetic construct
  misc_feature 1..20: note = synthesized
  source 1..20: mol_type = other RNA
aaagaaaaagccaatgcacg

SEQ ID NO: 1255 - RNA, 20 nt, synthetic construct
  misc_feature 1..20: note = synthesized
  source 1..20: mol_type = other RNA
aaagaaaaagccaatgcatg

SEQ ID NO: 1256 - RNA, 20 nt, synthetic construct
  misc_feature 1..20: note = synthesized
  source 1..20: mol_type = other RNA
aaagccaatgcacggcagat

SEQ ID NO: 1257 - RNA, 20 nt, synthetic construct
  misc_feature 1..20: note = synthesized
  source 1..20: mol_type = other RNA
aaagccaatgcatggcagat

SEQ ID NO: 1258 - RNA, 20 nt, synthetic construct
  misc_feature 1..20: note = synthesized
  source 1..20: mol_type = other RNA
aaattataatctgccatgca

SEQ ID NO: 1259 - RNA, 20 nt, synthetic construct
  misc_feature 1..20: note = synthesized
  source 1..20: mol_type = other RNA
aaattataatctgccgtgca

SEQ ID NO: 1260 - RNA, 20 nt, synthetic construct
  misc_feature 1..20: note = synthesized
  source 1..20: mol_type = other RNA
aagaaaaagccaatgcacgg

SEQ ID NO: 1261 - RNA, 20 nt, synthetic construct
  misc_feature 1..20: note = synthesized
  source 1..20: mol_type = other RNA
aagaaaaagccaatgcatgg

SEQ ID NO: 1262 - RNA, 20 nt, synthetic construct
  misc_feature 1..20: note = synthesized
  source 1..20: mol_type = other RNA
aagccaatgcacggcagatt

SEQ ID NO: 1263 - RNA, 20 nt, synthetic construct
  misc_feature 1..20: note = synthesized
  source 1..20: mol_type = other RNA
aagccaatgcatggcagatt

SEQ ID NO: 1264 - RNA, 20 nt, synthetic construct
  misc_feature 1..20: note = synthesized
  source 1..20: mol_type = other RNA
aatctgccatgcattggctt

SEQ ID NO: 1265 - RNA, 20 nt, synthetic construct
  misc_feature 1..20: note = synthesized
  source 1..20: mol_type = other RNA
aatctgccgtgcattggctt

SEQ ID NO: 1266 - RNA, 20 nt, synthetic construct
  misc_feature 1..20: note = synthesized
  source 1..20: mol_type = other RNA
acggcagattataatttaag

SEQ ID NO: 1267 - RNA, 20 nt, synthetic construct
  misc_feature 1..20: note = synthesized
  source 1..20: mol_type = other RNA
agccaatgcacggcagatta

SEQ ID NO: 1268 - RNA, 20 nt, synthetic construct
  misc_feature 1..20: note = synthesized
  source 1..20: mol_type = other RNA
agccaatgcatggcagatta

SEQ ID NO: 1269 - RNA, 20 nt, synthetic construct
  misc_feature 1..20: note = synthesized
  source 1..20: mol_type = other RNA
ataatctgccatgcattggc

SEQ ID NO: 1270 - RNA, 20 nt, synthetic construct
  misc_feature 1..20: note = synthesized
  source 1..20: mol_type = other RNA
ataatctgccgtgcattggc

SEQ ID NO: 1271 - RNA, 20 nt, synthetic construct
  misc_feature 1..20: note = synthesized
  source 1..20: mol_type = other RNA
atctgccatgcattggcttt

SEQ ID NO: 1272 - RNA, 20 nt, synthetic construct
  misc_feature 1..20: note = synthesized
  source 1..20: mol_type = other RNA
atctgccgtgcattggcttt

SEQ ID NO: 1273 - RNA, 20 nt, synthetic construct
  misc_feature 1..20: note = synthesized
  source 1..20: mol_type = other RNA
atgcacggcagattataatt

SEQ ID NO: 1274 - RNA, 20 nt, synthetic construct
  misc_feature 1..20: note = synthesized
  source 1..20: mol_type = other RNA
atgcatggcagattataatt

SEQ ID NO: 1275 - RNA, 20 nt, synthetic construct
  misc_feature 1..20: note = synthesized
  source 1..20: mol_type = other RNA
atggcagattataatttaag

SEQ ID NO: 1276 - RNA, 20 nt, synthetic construct
  misc_feature 1..20: note = synthesized
  source 1..20: mol_type = other RNA
attataatctgccatgcatt

SEQ ID NO: 1277 - RNA, 20 nt, synthetic construct
  misc_feature 1..20: note = synthesized
  source 1..20: mol_type = other RNA
attataatctgccgtgcatt

SEQ ID NO: 1278 - RNA, 20 nt, synthetic construct
  misc_feature 1..20: note = synthesized
  source 1..20: mol_type = other RNA
caatgcacggcagattataa

SEQ ID NO: 1279 - RNA, 20 nt, synthetic construct
  misc_feature 1..20: note = synthesized
  source 1..20: mol_type = other RNA
caatgcatggcagattataa

SEQ ID NO: 1280 - RNA, 20 nt, synthetic construct
  misc_feature 1..20: note = synthesized
  source 1..20: mol_type = other RNA
cacggcagattataatttaa

SEQ ID NO: 1281 - RNA, 20 nt, synthetic construct
  misc_feature 1..20: note = synthesized
  source 1..20: mol_type = other RNA
catgcattggctttttcttt

SEQ ID NO: 1282 - RNA, 20 nt, synthetic construct
  misc_feature 1..20: note = synthesized
  source 1..20: mol_type = other RNA
catggcagattataatttaa

SEQ ID NO: 1283 - RNA, 20 nt, synthetic construct
  misc_feature 1..20: note = synthesized
  source 1..20: mol_type = other RNA
ccaatgcacggcagattata

SEQ ID NO: 1284 - RNA, 20 nt, synthetic construct
  misc_feature 1..20: note = synthesized
  source 1..20: mol_type = other RNA
ccaatgcatggcagattata

SEQ ID NO: 1285 - RNA, 20 nt, synthetic construct
  misc_feature 1..20: note = synthesized
  source 1..20: mol_type = other RNA
ccatgcattggctttttctt

SEQ ID NO: 1286 - RNA, 20 nt, synthetic construct
  misc_feature 1..20: note = synthesized
  source 1..20: mol_type = other RNA
ccgtgcattggctttttctt

SEQ ID NO: 1287 - RNA, 20 nt, synthetic construct
  misc_feature 1..20: note = synthesized
  source 1..20: mol_type = other RNA
cggcagattataatttaagc

SEQ ID NO: 1288 - RNA, 20 nt, synthetic construct
  misc_feature 1..20: note = synthesized
  source 1..20: mol_type = other RNA
cgtgcattggctttttcttt

SEQ ID NO: 1289 - RNA, 20 nt, synthetic construct
  misc_feature 1..20: note = synthesized
  source 1..20: mol_type = other RNA
ctgccatgcattggcttttt

SEQ ID NO: 1290 - RNA, 20 nt, synthetic construct
  misc_feature 1..20: note = synthesized
  source 1..20: mol_type = other RNA
ctgccgtgcattggcttttt

SEQ ID NO: 1291 - RNA, 20 nt, synthetic construct
  misc_feature 1..20: note = synthesized
  source 1..20: mol_type = other RNA
cttaaattataatctgccat

SEQ ID NO: 1292 - RNA, 20 nt, synthetic construct
  misc_feature 1..20: note = synthesized
  source 1..20: mol_type = other RNA
cttaaattataatctgccgt

SEQ ID NO: 1293 - RNA, 20 nt, synthetic construct
  misc_feature 1..20: note = synthesized
  source 1..20: mol_type = other RNA
gaaaaagccaatgcacggca

SEQ ID NO: 1294 - RNA, 20 nt, synthetic construct
  misc_feature 1..20: note = synthesized
  source 1..20: mol_type = other RNA
gaaaaagccaatgcatggca

SEQ ID NO: 1295 - RNA, 20 nt, synthetic construct
  misc_feature 1..20: note = synthesized
  source 1..20: mol_type = other RNA
gcacggcagattataattta

SEQ ID NO: 1296 - RNA, 20 nt, synthetic construct
  misc_feature 1..20: note = synthesized
  source 1..20: mol_type = other RNA
gcatggcagattataattta

SEQ ID NO: 1297 - RNA, 20 nt, synthetic construct
  misc_feature 1..20: note = synthesized
  source 1..20: mol_type = other RNA
gccaatgcacggcagattat

SEQ ID NO: 1298 - RNA, 20 nt, synthetic construct
  misc_feature 1..20: note = synthesized
  source 1..20: mol_type = other RNA
gccaatgcatggcagattat

SEQ ID NO: 1299 - RNA, 20 nt, synthetic construct
  misc_feature 1..20: note = synthesized
  source 1..20: mol_type = other RNA
gccatgcattggctttttct

SEQ ID NO: 1300 - RNA, 20 nt, synthetic construct
  misc_feature 1..20: note = synthesized
  source 1..20: mol_type = other RNA
gccgtgcattggctttttct

SEQ ID NO: 1301 - RNA, 20 nt, synthetic construct
  misc_feature 1..20: note = synthesized
  source 1..20: mol_type = other RNA
gcttaaattataatctgcca

SEQ ID NO: 1302 - RNA, 20 nt, synthetic construct
  misc_feature 1..20: note = synthesized
  source 1..20: mol_type = other RNA
gcttaaattataatctgccg

SEQ ID NO: 1303 - RNA, 20 nt, synthetic construct
  misc_feature 1..20: note = synthesized
  source 1..20: mol_type = other RNA
taaattataatctgccatgc

SEQ ID NO: 1304 - RNA, 20 nt, synthetic construct
  misc_feature 1..20: note = synthesized
  source 1..20: mol_type = other RNA
taaattataatctgccgtgc

SEQ ID NO: 1305 - RNA, 20 nt, synthetic construct
  misc_feature 1..20: note = synthesized
  source 1..20: mol_type = other RNA
taatctgccatgcattggct

SEQ ID NO: 1306 - RNA, 20 nt, synthetic construct
  misc_feature 1..20: note = synthesized
  source 1..20: mol_type = other RNA
taatctgccgtgcattggct

SEQ ID NO: 1307 - RNA, 20 nt, synthetic construct
  misc_feature 1..20: note = synthesized
  source 1..20: mol_type = other RNA
tataatctgccatgcattgg

SEQ ID NO: 1308 - RNA, 20 nt, synthetic construct
  misc_feature 1..20: note = synthesized
  source 1..20: mol_type = other RNA
tataatctgccgtgcattgg

SEQ ID NO: 1309 - RNA, 20 nt, synthetic construct
  misc_feature 1..20: note = synthesized
  source 1..20: mol_type = other RNA
tctgccatgcattggctttt

SEQ ID NO: 1310 - RNA, 20 nt, synthetic construct
  misc_feature 1..20: note = synthesized
  source 1..20: mol_type = other RNA
tctgccgtgcattggctttt

SEQ ID NO: 1311 - RNA, 20 nt, synthetic construct
  misc_feature 1..20: note = synthesized
  source 1..20: mol_type = other RNA
tgcacggcagattataattt

SEQ ID NO: 1312 - RNA, 20 nt, synthetic construct
  misc_feature 1..20: note = synthesized
  source 1..20: mol_type = other RNA
tgcatggcagattataattt

SEQ ID NO: 1313 - RNA, 20 nt, synthetic construct
  misc_feature 1..20: note = synthesized
  source 1..20: mol_type = other RNA
tgccatgcattggctttttc

SEQ ID NO: 1314 - RNA, 20 nt, synthetic construct
  misc_feature 1..20: note = synthesized
  source 1..20: mol_type = other RNA
tgccgtgcattggctttttc

SEQ ID NO: 1315 - RNA, 20 nt, synthetic construct
  misc_feature 1..20: note = synthesized
  source 1..20: mol_type = other RNA
tggcagattataatttaagc

SEQ ID NO: 1316 - RNA, 20 nt, synthetic construct
  misc_feature 1..20: note = synthesized
  source 1..20: mol_type = other RNA
ttaaattataatctgccatg

SEQ ID NO: 1317 - RNA, 20 nt, synthetic construct
  misc_feature 1..20: note = synthesized
  source 1..20: mol_type = other RNA
ttaaattataatctgccgtg

SEQ ID NO: 1318 - RNA, 20 nt, synthetic construct
  misc_feature 1..20: note = synthesized
  source 1..20: mol_type = other RNA
ttataatctgccatgcattg

SEQ ID NO: 1319 - RNA, 20 nt, synthetic construct
  misc_feature 1..20: note = synthesized
  source 1..20: mol_type = other RNA
ttataatctgccgtgcattg

SEQ ID NO: 1320 - RNA, 20 nt, synthetic construct
  misc_feature 1..20: note = synthesized
  source 1..20: mol_type = other RNA
aaattaggtgccaggaaatt

SEQ ID NO: 1321 - RNA, 20 nt, synthetic construct
  misc_feature 1..20: note = synthesized
  source 1..20: mol_type = other RNA
aatctatggctaagtggacc

SEQ ID NO: 1322 - RNA, 20 nt, synthetic construct
  misc_feature 1..20: note = synthesized
  source 1..20: mol_type = other RNA
aatttatggctaagtggacc

SEQ ID NO: 1323 - RNA, 20 nt, synthetic construct
  misc_feature 1..20: note = synthesized
  source 1..20: mol_type = other RNA
aatttcctggcacctaatct

SEQ ID NO: 1324 - RNA, 20 nt, synthetic construct
  misc_feature 1..20: note = synthesized
  source 1..20: mol_type = other RNA
aatttcctggcacctaattt

SEQ ID NO: 1325 - RNA, 20 nt, synthetic construct
  misc_feature 1..20: note = synthesized
  source 1..20: mol_type = other RNA
acctaatctatggctaagtg

SEQ ID NO: 1326 - RNA, 20 nt, synthetic construct
  misc_feature 1..20: note = synthesized
  source 1..20: mol_type = other RNA
acctaatttatggctaagtg

SEQ ID NO: 1327 - RNA, 20 nt, synthetic construct
  misc_feature 1..20: note = synthesized
  source 1..20: mol_type = other RNA
acttagccataaattaggtg

SEQ ID NO: 1328 - RNA, 20 nt, synthetic construct
  misc_feature 1..20: note = synthesized
  source 1..20: mol_type = other RNA
acttagccatagattaggtg

SEQ ID NO: 1329 - RNA, 20 nt, synthetic construct
  misc_feature 1..20: note = synthesized
  source 1..20: mol_type = other RNA
agattaggtgccaggaaatt

SEQ ID NO: 1330 - RNA, 20 nt, synthetic construct
  misc_feature 1..20: note = synthesized
  source 1..20: mol_type = other RNA
agccataaattaggtgccag

SEQ ID NO: 1331 - RNA, 20 nt, synthetic construct
  misc_feature 1..20: note = synthesized
  source 1..20: mol_type = other RNA
agccatagattaggtgccag

SEQ ID NO: 1332 - RNA, 20 nt, synthetic construct
  misc_feature 1..20: note = synthesized
  source 1..20: mol_type = other RNA
agggtccacttagccataaa

SEQ ID NO: 1333 - RNA, 20 nt, synthetic construct
  misc_feature 1..20: note = synthesized
  source 1..20: mol_type = other RNA
agggtccacttagccataga

SEQ ID NO: 1334 - RNA, 20 nt, synthetic construct
  misc_feature 1..20: note = synthesized
  source 1..20: mol_type = other RNA
ataaattaggtgccaggaaa

SEQ ID NO: 1335 - RNA, 20 nt, synthetic construct
  misc_feature 1..20: note = synthesized
  source 1..20: mol_type = other RNA
atagattaggtgccaggaaa

SEQ ID NO: 1336 - RNA, 20 nt, synthetic construct
  misc_feature 1..20: note = synthesized
  source 1..20: mol_type = other RNA
atctatggctaagtggaccc

SEQ ID NO: 1337 - RNA, 20 nt, synthetic construct
  misc_feature 1..20: note = synthesized
  source 1..20: mol_type = other RNA
atttatggctaagtggaccc

SEQ ID NO: 1338 - RNA, 20 nt, synthetic construct
  misc_feature 1..20: note = synthesized
  source 1..20: mol_type = other RNA
caatttcctggcacctaatc

SEQ ID NO: 1339 - RNA, 20 nt, synthetic construct
  misc_feature 1..20: note = synthesized
  source 1..20: mol_type = other RNA
caatttcctggcacctaatt

SEQ ID NO: 1340 - RNA, 20 nt, synthetic construct
  misc_feature 1..20: note = synthesized
  source 1..20: mol_type = other RNA
cacttagccataaattaggt

SEQ ID NO: 1341 - RNA, 20 nt, synthetic construct
  misc_feature 1..20: note = synthesized
  source 1..20: mol_type = other RNA
cacttagccatagattaggt

SEQ ID NO: 1342 - RNA, 20 nt, synthetic construct
  misc_feature 1..20: note = synthesized
  source 1..20: mol_type = other RNA
cataaattaggtgccaggaa

SEQ ID NO: 1343 - RNA, 20 nt, synthetic construct
  misc_feature 1..20: note = synthesized
  source 1..20: mol_type = other RNA
catagattaggtgccaggaa

SEQ ID NO: 1344 - RNA, 20 nt, synthetic construct
  misc_feature 1..20: note = synthesized
  source 1..20: mol_type = other RNA
ccacttagccataaattagg

SEQ ID NO: 1345 - RNA, 20 nt, synthetic construct
  misc_feature 1..20: note = synthesized
  source 1..20: mol_type = other RNA
ccacttagccatagattagg

SEQ ID NO: 1346 - RNA, 20 nt, synthetic construct
  misc_feature 1..20: note = synthesized
  source 1..20: mol_type = other RNA
ccataaattaggtgccagga

SEQ ID NO: 1347 - RNA, 20 nt, synthetic construct
  misc_feature 1..20: note = synthesized
  source 1..20: mol_type = other RNA
ccatagattaggtgccagga

SEQ ID NO: 1348 - RNA, 20 nt, synthetic construct
  misc_feature 1..20: note = synthesized
  source 1..20: mol_type = other RNA
cctaatctatggctaagtgg

SEQ ID NO: 1349 - RNA, 20 nt, synthetic construct
  misc_feature 1..20: note = synthesized
  source 1..20: mol_type = other RNA
cctaatttatggctaagtgg

SEQ ID NO: 1350 - RNA, 20 nt, synthetic construct
  misc_feature 1..20: note = synthesized
  source 1..20: mol_type = other RNA
cctggcacctaatctatggc

SEQ ID NO: 1351 - RNA, 20 nt, synthetic construct
  misc_feature 1..20: note = synthesized
  source 1..20: mol_type = other RNA
cctggcacctaatttatggc

SEQ ID NO: 1352 - RNA, 20 nt, synthetic construct
  misc_feature 1..20: note = synthesized
  source 1..20: mol_type = other RNA
ctaatctatggctaagtgga

SEQ ID NO: 1353 - RNA, 20 nt, synthetic construct
  misc_feature 1..20: note = synthesized
  source 1..20: mol_type = other RNA
ctaatttatggctaagtgga

SEQ ID NO: 1354 - RNA, 20 nt, synthetic construct
  misc_feature 1..20: note = synthesized
  source 1..20: mol_type = other RNA
ctatggctaagtggaccctc

SEQ ID NO: 1355 - RNA, 20 nt, synthetic construct
  misc_feature 1..20: note = synthesized
  source 1..20: mol_type = other RNA
ctggcacctaatctatggct

SEQ ID NO: 1356 - RNA, 20 nt, synthetic construct
  misc_feature 1..20: note = synthesized
  source 1..20: mol_type = other RNA
ctggcacctaatttatggct

SEQ ID NO: 1357 - RNA, 20 nt, synthetic construct
  misc_feature 1..20: note = synthesized
  source 1..20: mol_type = other RNA
cttagccataaattaggtgc

SEQ ID NO: 1358 - RNA, 20 nt, synthetic construct
  misc_feature 1..20: note = synthesized
  source 1..20: mol_type = other RNA
cttagccatagattaggtgc

SEQ ID NO: 1359 - RNA, 20 nt, synthetic construct
  misc_feature 1..20: note = synthesized
  source 1..20: mol_type = other RNA
gagggtccacttagccataa

SEQ ID NO: 1360 - RNA, 20 nt, synthetic construct
  misc_feature 1..20: note = synthesized
  source 1..20: mol_type = other RNA
gagggtccacttagccatag

SEQ ID NO: 1361 - RNA, 20 nt, synthetic construct
  misc_feature 1..20: note = synthesized
  source 1..20: mol_type = other RNA
gccataaattaggtgccagg

SEQ ID NO: 1362 - RNA, 20 nt, synthetic construct
  misc_feature 1..20: note = synthesized
  source 1..20: mol_type = other RNA
gccatagattaggtgccagg

SEQ ID NO: 1363 - RNA, 20 nt, synthetic construct
  misc_feature 1..20: note = synthesized
  source 1..20: mol_type = other RNA
gggtccacttagccataaat

SEQ ID NO: 1364 - RNA, 20 nt, synthetic construct
  misc_feature 1..20: note = synthesized
  source 1..20: mol_type = other RNA
gggtccacttagccatagat

SEQ ID NO: 1365 - RNA, 20 nt, synthetic construct
  misc_feature 1..20: note = synthesized
  source 1..20: mol_type = other RNA
taatctatggctaagtggac

SEQ ID NO: 1366 - RNA, 20 nt, synthetic construct
  misc_feature 1..20: note = synthesized
  source 1..20: mol_type = other RNA
taatttatggctaagtggac

SEQ ID NO: 1367 - RNA, 20 nt, synthetic construct
  misc_feature 1..20: note = synthesized
  source 1..20: mol_type = other RNA
tccacttagccataaattag

SEQ ID NO: 1368 - RNA, 20 nt, synthetic construct
  misc_feature 1..20: note = synthesized
  source 1..20: mol_type = other RNA
tccacttagccatagattag

SEQ ID NO: 1369 - RNA, 20 nt, synthetic construct
  misc_feature 1..20: note = synthesized
  source 1..20: mol_type = other RNA
tcctggcacctaatctatgg

SEQ ID NO: 1370 - RNA, 20 nt, synthetic construct
  misc_feature 1..20: note = synthesized
  source 1..20: mol_type = other RNA
tcctggcacctaatttatgg

SEQ ID NO: 1371 - RNA, 20 nt, synthetic construct
  misc_feature 1..20: note = synthesized
  source 1..20: mol_type = other RNA
tctatggctaagtggaccct

SEQ ID NO: 1372 - RNA, 20 nt, synthetic construct
  misc_feature 1..20: note = synthesized
  source 1..20: mol_type = other RNA
ttatggctaagtggaccctc

SEQ ID NO: 1373 - RNA, 20 nt, synthetic construct
  misc_feature 1..20: note = synthesized
  source 1..20: mol_type = other RNA
ttcctggcacctaatctatg

SEQ ID NO: 1374 - RNA, 20 nt, synthetic construct
  misc_feature 1..20: note = synthesized
  source 1..20: mol_type = other RNA
ttcctggcacctaatttatg

SEQ ID NO: 1375 - RNA, 20 nt, synthetic construct
  misc_feature 1..20: note = synthesized
  source 1..20: mol_type = other RNA
tttatggctaagtggaccct

SEQ ID NO: 1376 - RNA, 20 nt, synthetic construct
  misc_feature 1..20: note = synthesized
  source 1..20: mol_type = other RNA
tttcctggcacctaatctat

SEQ ID NO: 1377 - RNA, 20 nt, synthetic construct
  misc_feature 1..20: note = synthesized
  source 1..20: mol_type = other RNA
tttcctggcacctaatttat

SEQ ID NO: 1378 - RNA, 20 nt, synthetic construct
  misc_feature 1..20: note = synthesized
  source 1..20: mol_type = other RNA
aaaaacaaggacatctggga

SEQ ID NO: 1379 - RNA, 20 nt, synthetic construct
  misc_feature 1..20: note = synthesized
  source 1..20: mol_type = other RNA
agaaacaaggacatctggga

SEQ ID NO: 1380 - RNA, 20 nt, synthetic construct
  misc_feature 1..20: note = synthesized
  source 1..20: mol_type = other RNA
caaaaacaaggacatctggg

SEQ ID NO: 1381 - RNA, 20 nt, synthetic construct
  misc_feature 1..20: note = synthesized
  source 1..20: mol_type = other RNA
cagaaacaaggacatctggg

SEQ ID NO: 1382 - RNA, 20 nt, synthetic construct
  misc_feature 1..20: note = synthesized
  source 1..20: mol_type = other RNA
cagatgtccttgtttctgag

SEQ ID NO: 1383 - RNA, 20 nt, synthetic construct
  misc_feature 1..20: note = synthesized
  source 1..20: mol_type = other RNA
cagatgtccttgtttttgag

SEQ ID NO: 1384 - RNA, 20 nt, synthetic construct
  misc_feature 1..20: note = synthesized
  source 1..20: mol_type = other RNA
ccagatgtccttgtttctga

SEQ ID NO: 1385 - RNA, 20 nt, synthetic construct
  misc_feature 1..20: note = synthesized
  source 1..20: mol_type = other RNA
ccagatgtccttgtttttga

SEQ ID NO: 1386 - RNA, 20 nt, synthetic construct
  misc_feature 1..20: note = synthesized
  source 1..20: mol_type = other RNA
cccagatgtccttgtttctg

SEQ ID NO: 1387 - RNA, 20 nt, synthetic construct
  misc_feature 1..20: note = synthesized
  source 1..20: mol_type = other RNA
cccagatgtccttgtttttg

SEQ ID NO: 1388 - RNA, 20 nt, synthetic construct
  misc_feature 1..20: note = synthesized
  source 1..20: mol_type = other RNA
ccctctactcaaaaacaagg

SEQ ID NO: 1389 - RNA, 20 nt, synthetic construct
  misc_feature 1..20: note = synthesized
  source 1..20: mol_type = other RNA
ccctctactcagaaacaagg

SEQ ID NO: 1390 - RNA, 20 nt, synthetic construct
  misc_feature 1..20: note = synthesized
  source 1..20: mol_type = other RNA
cctctactcaaaaacaagga

SEQ ID NO: 1391 - RNA, 20 nt, synthetic construct
  misc_feature 1..20: note = synthesized
  source 1..20: mol_type = other RNA
cctctactcagaaacaagga

SEQ ID NO: 1392 - RNA, 20 nt, synthetic construct
  misc_feature 1..20: note = synthesized
  source 1..20: mol_type = other RNA
ccttgtttctgagtagaggg

SEQ ID NO: 1393 - RNA, 20 nt, synthetic construct
  misc_feature 1..20: note = synthesized
  source 1..20: mol_type = other RNA
ccttgtttttgagtagaggg

SEQ ID NO: 1394 - RNA, 20 nt, synthetic construct
  misc_feature 1..20: note = synthesized
  source 1..20: mol_type = other RNA
ccttttccctctactcaaaa

SEQ ID NO: 1395 - RNA, 20 nt, synthetic construct
  misc_feature 1..20: note = synthesized
  source 1..20: mol_type = other RNA
ccttttccctctactcagaa

SEQ ID NO: 1396 - RNA, 20 nt, synthetic construct
  misc_feature 1..20: note = synthesized
  source 1..20: mol_type = other RNA
ctactcaaaaacaaggacat

SEQ ID NO: 1397 - RNA, 20 nt, synthetic construct
  misc_feature 1..20: note = synthesized
  source 1..20: mol_type = other RNA
ctactcagaaacaaggacat

SEQ ID NO: 1398 - RNA, 20 nt, synthetic construct
  misc_feature 1..20: note = synthesized
  source 1..20: mol_type = other RNA
ctctactcaaaaacaaggac

SEQ ID NO: 1399 - RNA, 20 nt, synthetic construct
  misc_feature 1..20: note = synthesized
  source 1..20: mol_type = other RNA
ctctactcagaaacaaggac

SEQ ID NO: 1400 - RNA, 20 nt, synthetic construct
  misc_feature 1..20: note = synthesized
  source 1..20: mol_type = other RNA
cttgtttctgagtagaggga

SEQ ID NO: 1401 - RNA, 20 nt, synthetic construct
  misc_feature 1..20: note = synthesized
  source 1..20: mol_type = other RNA
cttgtttttgagtagaggga

SEQ ID NO: 1402 - RNA, 20 nt, synthetic construct
  misc_feature 1..20: note = synthesized
  source 1..20: mol_type = other RNA
cttttccctctactcaaaaa

SEQ ID NO: 1403 - RNA, 20 nt, synthetic construct
  misc_feature 1..20: note = synthesized
  source 1..20: mol_type = other RNA
cttttccctctactcagaaa

SEQ ID NO: 1404 - RNA, 20 nt, synthetic construct
  misc_feature 1..20: note = synthesized
  source 1..20: mol_type = other RNA
gatgtccttgtttctgagta

SEQ ID NO: 1405 - RNA, 20 nt, synthetic construct
  misc_feature 1..20: note = synthesized
  source 1..20: mol_type = other RNA
gatgtccttgtttttgagta

SEQ ID NO: 1406 - RNA, 20 nt, synthetic construct
  misc_feature 1..20: note = synthesized
  source 1..20: mol_type = other RNA
tcccagatgtccttgtttct

SEQ ID NO: 1407 - RNA, 20 nt, synthetic construct
  misc_feature 1..20: note = synthesized
  source 1..20: mol_type = other RNA
tcccagatgtccttgttttt

SEQ ID NO: 1408 - RNA, 20 nt, synthetic construct
  misc_feature 1..20: note = synthesized
  source 1..20: mol_type = other RNA
tccctctactcaaaaacaag

SEQ ID NO: 1409 - RNA, 20 nt, synthetic construct
  misc_feature 1..20: note = synthesized
  source 1..20: mol_type = other RNA
tccctctactcagaaacaag

SEQ ID NO: 1410 - RNA, 20 nt, synthetic construct
  misc_feature 1..20: note = synthesized
  source 1..20: mol_type = other RNA
tccttgtttctgagtagagg

SEQ ID NO: 1411 - RNA, 20 nt, synthetic construct
  misc_feature 1..20: note = synthesized
  source 1..20: mol_type = other RNA
tccttgtttttgagtagagg

SEQ ID NO: 1412 - RNA, 20 nt, synthetic construct
  misc_feature 1..20: note = synthesized
  source 1..20: mol_type = other RNA
tccttttccctctactcaaa

SEQ ID NO: 1413 - RNA, 20 nt, synthetic construct
  misc_feature 1..20: note = synthesized
  source 1..20: mol_type = other RNA
tccttttccctctactcaga

SEQ ID NO: 1414 - RNA, 20 nt, synthetic construct
  misc_feature 1..20: note = synthesized
  source 1..20: mol_type = other RNA
tctactcaaaaacaaggaca

SEQ ID NO: 1415 - RNA, 20 nt, synthetic construct
  misc_feature 1..20: note = synthesized
  source 1..20: mol_type = other RNA
tctactcagaaacaaggaca

SEQ ID NO: 1416 - RNA, 20 nt, synthetic construct
  misc_feature 1..20: note = synthesized
  source 1..20: mol_type = other RNA
ttccttttccctctactcaa

SEQ ID NO: 1417 - RNA, 20 nt, synthetic construct
  misc_feature 1..20: note = synthesized
  source 1..20: mol_type = other RNA
ttccttttccctctactcag

SEQ ID NO: 1418 - RNA, 20 nt, synthetic construct
  misc_feature 1..20: note = synthesized
  source 1..20: mol_type = other RNA
ttctgagtagagggaaaagg

SEQ ID NO: 1419 - RNA, 20 nt, synthetic construct
  misc_feature 1..20: note = synthesized
  source 1..20: mol_type = other RNA
ttgtttctgagtagagggaa

SEQ ID NO: 1420 - RNA, 20 nt, synthetic construct
  misc_feature 1..20: note = synthesized
  source 1..20: mol_type = other RNA
ttgtttttgagtagagggaa

SEQ ID NO: 1421 - RNA, 20 nt, synthetic construct
  misc_feature 1..20: note = synthesized
  source 1..20: mol_type = other RNA
ttttgagtagagggaaaagg

SEQ ID NO: 1422 - RNA, 20 nt, synthetic construct
  misc_feature 1..20: note = synthesized
  source 1..20: mol_type = other RNA
tttttgagtagagggaaaag

SEQ ID NO: 1423 - RNA, 20 nt, synthetic construct
  misc_feature 1..20: note = synthesized
  source 1..20: mol_type = other RNA
aaggtactgcatggaaaaac

SEQ ID NO: 1424 - RNA, 20 nt, synthetic construct
  misc_feature 1..20: note = synthesized
  source 1..20: mol_type = other RNA
aaggtactgcgtggaaaaac

SEQ ID NO: 1425 - RNA, 20 nt, synthetic construct
  misc_feature 1..20: note = synthesized
  source 1..20: mol_type = other RNA
actctgcttggtttttccac

SEQ ID NO: 1426 - RNA, 20 nt, synthetic construct
  misc_feature 1..20: note = synthesized
  source 1..20: mol_type = other RNA
actctgcttggtttttccat

SEQ ID NO: 1427 - RNA, 20 nt, synthetic construct
  misc_feature 1..20: note = synthesized
  source 1..20: mol_type = other RNA
aggtactgcatggaaaaacc

SEQ ID NO: 1428 - RNA, 20 nt, synthetic construct
  misc_feature 1..20: note = synthesized
  source 1..20: mol_type = other RNA
aggtactgcgtggaaaaacc

SEQ ID NO: 1429 - RNA, 20 nt, synthetic construct
  misc_feature 1..20: note = synthesized
  source 1..20: mol_type = other RNA
ataaggtactgcatggaaaa

SEQ ID NO: 1430 - RNA, 20 nt, synthetic construct
  misc_feature 1..20: note = synthesized
  source 1..20: mol_type = other RNA
ataaggtactgcgtggaaaa

SEQ ID NO: 1431 - RNA, 20 nt, synthetic construct
  misc_feature 1..20: note = synthesized
  source 1..20: mol_type = other RNA
atggaaaaaccaagcagagt

SEQ ID NO: 1432 - RNA, 20 nt, synthetic construct
  misc_feature 1..20: note = synthesized
  source 1..20: mol_type = other RNA
catggaaaaaccaagcagag

SEQ ID NO: 1433 - RNA, 20 nt, synthetic construct
  misc_feature 1..20: note = synthesized
  source 1..20: mol_type = other RNA
ccacgcagtaccttataact

SEQ ID NO: 1434 - RNA, 20 nt, synthetic construct
  misc_feature 1..20: note = synthesized
  source 1..20: mol_type = other RNA
ccatgcagtaccttataact

SEQ ID NO: 1435 - RNA, 20 nt, synthetic construct
  misc_feature 1..20: note = synthesized
  source 1..20: mol_type = other RNA
cgtggaaaaaccaagcagag

SEQ ID NO: 1436 - RNA, 20 nt, synthetic construct
  misc_feature 1..20: note = synthesized
  source 1..20: mol_type = other RNA
ctctgcttggtttttccacg

SEQ ID NO: 1437 - RNA, 20 nt, synthetic construct
  misc_feature 1..20: note = synthesized
  source 1..20: mol_type = other RNA
ctctgcttggtttttccatg

SEQ ID NO: 1438 - RNA, 20 nt, synthetic construct
  misc_feature 1..20: note = synthesized
  source 1..20: mol_type = other RNA
ctgcatggaaaaaccaagca

SEQ ID NO: 1439 - RNA, 20 nt, synthetic construct
  misc_feature 1..20: note = synthesized
  source 1..20: mol_type = other RNA
ctgcgtggaaaaaccaagca

SEQ ID NO: 1440 - RNA, 20 nt, synthetic construct
  misc_feature 1..20: note = synthesized
  source 1..20: mol_type = other RNA
ctgcttggtttttccacgca

SEQ ID NO: 1441 - RNA, 20 nt, synthetic construct
  misc_feature 1..20: note = synthesized
  source 1..20: mol_type = other RNA
ctgcttggtttttccatgca

SEQ ID NO: 1442 - RNA, 20 nt, synthetic construct
  misc_feature 1..20: note = synthesized
  source 1..20: mol_type = other RNA
cttggtttttccacgcagta

SEQ ID NO: 1443 - RNA, 20 nt, synthetic construct
  misc_feature 1..20: note = synthesized
  source 1..20: mol_type = other RNA
cttggtttttccatgcagta

SEQ ID NO: 1444 - RNA, 20 nt, synthetic construct
  misc_feature 1..20: note = synthesized
  source 1..20: mol_type = other RNA
gagttataaggtactgcatg

SEQ ID NO: 1445 - RNA, 20 nt, synthetic construct
  misc_feature 1..20: note = synthesized
  source 1..20: mol_type = other RNA
gagttataaggtactgcgtg

SEQ ID NO: 1446 - RNA, 20 nt, synthetic construct
  misc_feature 1..20: note = synthesized
  source 1..20: mol_type = other RNA
gcatggaaaaaccaagcaga

SEQ ID NO: 1447 - RNA, 20 nt, synthetic construct
  misc_feature 1..20: note = synthesized
  source 1..20: mol_type = other RNA
gcgtggaaaaaccaagcaga

SEQ ID NO: 1448 - RNA, 20 nt, synthetic construct
  misc_feature 1..20: note = synthesized
  source 1..20: mol_type = other RNA
gcttggtttttccacgcagt

SEQ ID NO: 1449 - RNA, 20 nt, synthetic construct
  misc_feature 1..20: note = synthesized
  source 1..20: mol_type = other RNA
gcttggtttttccatgcagt

SEQ ID NO: 1450 - RNA, 20 nt, synthetic construct
  misc_feature 1..20: note = synthesized
  source 1..20: mol_type = other RNA
ggtactgcatggaaaaacca

SEQ ID NO: 1451 - RNA, 20 nt, synthetic construct
  misc_feature 1..20: note = synthesized
  source 1..20: mol_type = other RNA
ggtactgcgtggaaaaacca

SEQ ID NO: 1452 - RNA, 20 nt, synthetic construct
  misc_feature 1..20: note = synthesized
  source 1..20: mol_type = other RNA
ggtttttccacgcagtacct

SEQ ID NO: 1453 - RNA, 20 nt, synthetic construct
  misc_feature 1..20: note = synthesized
  source 1..20: mol_type = other RNA
ggtttttccatgcagtacct

SEQ ID NO: 1454 - RNA, 20 nt, synthetic construct
  misc_feature 1..20: note = synthesized
  source 1..20: mol_type = other RNA
gtactgcatggaaaaaccaa

SEQ ID NO: 1455 - RNA, 20 nt, synthetic construct
  misc_feature 1..20: note = synthesized
  source 1..20: mol_type = other RNA
gtactgcgtggaaaaaccaa

SEQ ID NO: 1456 - RNA, 20 nt, synthetic construct
  misc_feature 1..20: note = synthesized
  source 1..20: mol_type = other RNA
gtggaaaaaccaagcagagt

SEQ ID NO: 1457 - RNA, 20 nt, synthetic construct
  misc_feature 1..20: note = synthesized
  source 1..20: mol_type = other RNA
gttataaggtactgcatgga

SEQ ID NO: 1458 - RNA, 20 nt, synthetic construct
  misc_feature 1..20: note = synthesized
  source 1..20: mol_type = other RNA
gttataaggtactgcgtgga

SEQ ID NO: 1459 - RNA, 20 nt, synthetic construct
  misc_feature 1..20: note = synthesized
  source 1..20: mol_type = other RNA
gtttttccacgcagtacctt

SEQ ID NO: 1460 - RNA, 20 nt, synthetic construct
  misc_feature 1..20: note = synthesized
  source 1..20: mol_type = other RNA
gtttttccatgcagtacctt

SEQ ID NO: 1461 - RNA, 20 nt, synthetic construct
  misc_feature 1..20: note = synthesized
  source 1..20: mol_type = other RNA
tataaggtactgcatggaaa

SEQ ID NO: 1462 - RNA, 20 nt, synthetic construct
  misc_feature 1..20: note = synthesized
  source 1..20: mol_type = other RNA
tataaggtactgcgtggaaa

SEQ ID NO: 1463 - RNA, 20 nt, synthetic construct
  misc_feature 1..20: note = synthesized
  source 1..20: mol_type = other RNA
tccacgcagtaccttataac

SEQ ID NO: 1464 - RNA, 20 nt, synthetic construct
  misc_feature 1..20: note = synthesized
  source 1..20: mol_type = other RNA
tccatgcagtaccttataac

SEQ ID NO: 1465 - RNA, 20 nt, synthetic construct
  misc_feature 1..20: note = synthesized
  source 1..20: mol_type = other RNA
tctgcttggtttttccacgc

SEQ ID NO: 1466 - RNA, 20 nt, synthetic construct
  misc_feature 1..20: note = synthesized
  source 1..20: mol_type = other RNA
tctgcttggtttttccatgc

SEQ ID NO: 1467 - RNA, 20 nt, synthetic construct
  misc_feature 1..20: note = synthesized
  source 1..20: mol_type = other RNA
tgcatggaaaaaccaagcag

SEQ ID NO: 1468 - RNA, 20 nt, synthetic construct
  misc_feature 1..20: note = synthesized
  source 1..20: mol_type = other RNA
tgcgtggaaaaaccaagcag

SEQ ID NO: 1469 - RNA, 20 nt, synthetic construct
  misc_feature 1..20: note = synthesized
  source 1..20: mol_type = other RNA
tgcttggtttttccacgcag

SEQ ID NO: 1470 - RNA, 20 nt, synthetic construct
  misc_feature 1..20: note = synthesized
  source 1..20: mol_type = other RNA
tgcttggtttttccatgcag

SEQ ID NO: 1471 - RNA, 20 nt, synthetic construct
  misc_feature 1..20: note = synthesized
  source 1..20: mol_type = other RNA
tggtttttccacgcagtacc

SEQ ID NO: 1472 - RNA, 20 nt, synthetic construct
  misc_feature 1..20: note = synthesized
  source 1..20: mol_type = other RNA
tggtttttccatgcagtacc

SEQ ID NO: 1473 - RNA, 20 nt, synthetic construct
  misc_feature 1..20: note = synthesized
  source 1..20: mol_type = other RNA
ttataaggtactgcatggaa

SEQ ID NO: 1474 - RNA, 20 nt, synthetic construct
  misc_feature 1..20: note = synthesized
  source 1..20: mol_type = other RNA
ttataaggtactgcgtggaa

SEQ ID NO: 1475 - RNA, 20 nt, synthetic construct
  misc_feature 1..20: note = synthesized
  source 1..20: mol_type = other RNA
ttccacgcagtaccttataa

SEQ ID NO: 1476 - RNA, 20 nt, synthetic construct
  misc_feature 1..20: note = synthesized
  source 1..20: mol_type = other RNA
ttccatgcagtaccttataa

SEQ ID NO: 1477 - RNA, 20 nt, synthetic construct
  misc_feature 1..20: note = synthesized
  source 1..20: mol_type = other RNA
ttggtttttccacgcagtac

SEQ ID NO: 1478 - RNA, 20 nt, synthetic construct
  misc_feature 1..20: note = synthesized
  source 1..20: mol_type = other RNA
ttggtttttccatgcagtac

SEQ ID NO: 1479 - RNA, 20 nt, synthetic construct
  misc_feature 1..20: note = synthesized
  source 1..20: mol_type = other RNA
tttccacgcagtaccttata

SEQ ID NO: 1480 - RNA, 20 nt, synthetic construct
  misc_feature 1..20: note = synthesized
  source 1..20: mol_type = other RNA
tttccatgcagtaccttata

SEQ ID NO: 1481 - RNA, 20 nt, synthetic construct
  misc_feature 1..20: note = synthesized
  source 1..20: mol_type = other RNA
ttttccacgcagtaccttat

SEQ ID NO: 1482 - RNA, 20 nt, synthetic construct
  misc_feature 1..20: note = synthesized
  source 1..20: mol_type = other RNA
ttttccatgcagtaccttat

SEQ ID NO: 1483 - RNA, 20 nt, synthetic construct
  misc_feature 1..20: note = synthesized
  source 1..20: mol_type = other RNA
tttttccacgcagtacctta

SEQ ID NO: 1484 - RNA, 20 nt, synthetic construct
  misc_feature 1..20: note = synthesized
  source 1..20: mol_type = other RNA
tttttccatgcagtacctta

SEQ ID NO: 1485 - RNA, 20 nt, synthetic construct
  misc_feature 1..20: note = synthesized
  source 1..20: mol_type = other RNA
aaaattaggccccttgtgac

SEQ ID NO: 1486 - RNA, 20 nt, synthetic construct
  misc_feature 1..20: note = synthesized
  source 1..20: mol_type = other RNA
aaaattaggcctcttgtgac

SEQ ID NO: 1487 - RNA, 20 nt, synthetic construct
  misc_feature 1..20: note = synthesized
  source 1..20: mol_type = other RNA
aaattaggccccttgtgacc

SEQ ID NO: 1488 - RNA, 20 nt, synthetic construct
  misc_feature 1..20: note = synthesized
  source 1..20: mol_type = other RNA
aaattaggcctcttgtgacc

SEQ ID NO: 1489 - RNA, 20 nt, synthetic construct
  misc_feature 1..20: note = synthesized
  source 1..20: mol_type = other RNA
aagaggcctaattttcatgc

SEQ ID NO: 1490 - RNA, 20 nt, synthetic construct
  misc_feature 1..20: note = synthesized
  source 1..20: mol_type = other RNA
aaggggcctaattttcatgc

SEQ ID NO: 1491 - RNA, 20 nt, synthetic construct
  misc_feature 1..20: note = synthesized
  source 1..20: mol_type = other RNA
aattaggccccttgtgaccc

SEQ ID NO: 1492 - RNA, 20 nt, synthetic construct
  misc_feature 1..20: note = synthesized
  source 1..20: mol_type = other RNA
aattaggcctcttgtgaccc

SEQ ID NO: 1493 - RNA, 20 nt, synthetic construct
  misc_feature 1..20: note = synthesized
  source 1..20: mol_type = other RNA
agcctattgggtcacaagag

SEQ ID NO: 1494 - RNA, 20 nt, synthetic construct
  misc_feature 1..20: note = synthesized
  source 1..20: mol_type = other RNA
agcctattgggtcacaaggg

SEQ ID NO: 1495 - RNA, 20 nt, synthetic construct
  misc_feature 1..20: note = synthesized
  source 1..20: mol_type = other RNA
aggccccttgtgacccaata

SEQ ID NO: 1496 - RNA, 20 nt, synthetic construct
  misc_feature 1..20: note = synthesized
  source 1..20: mol_type = other RNA
aggcctaattttcatgcgaa

SEQ ID NO: 1497 - RNA, 20 nt, synthetic construct
  misc_feature 1..20: note = synthesized
  source 1..20: mol_type = other RNA
aggcctcttgtgacccaata

SEQ ID NO: 1498 - RNA, 20 nt, synthetic construct
  misc_feature 1..20: note = synthesized
  source 1..20: mol_type = other RNA
atgaaaattaggccccttgt

SEQ ID NO: 1499 - RNA, 20 nt, synthetic construct
  misc_feature 1..20: note = synthesized
  source 1..20: mol_type = other RNA
atgaaaattaggcctcttgt

SEQ ID NO: 1500 - RNA, 20 nt, synthetic construct
  misc_feature 1..20: note = synthesized
  source 1..20: mol_type = other RNA
attaggccccttgtgaccca

SEQ ID NO: 1501 - RNA, 20 nt, synthetic construct
  misc_feature 1..20: note = synthesized
  source 1..20: mol_type = other RNA
attaggcctcttgtgaccca

SEQ ID NO: 1502 - RNA, 20 nt, synthetic construct
  misc_feature 1..20: note = synthesized
  source 1..20: mol_type = other RNA
attgggtcacaagaggccta

SEQ ID NO: 1503 - RNA, 20 nt, synthetic construct
  misc_feature 1..20: note = synthesized
  source 1..20: mol_type = other RNA
attgggtcacaaggggccta

SEQ ID NO: 1504 - RNA, 20 nt, synthetic construct
  misc_feature 1..20: note = synthesized
  source 1..20: mol_type = other RNA
cagcctattgggtcacaaga

SEQ ID NO: 1505 - RNA, 20 nt, synthetic construct
  misc_feature 1..20: note = synthesized
  source 1..20: mol_type = other RNA
cagcctattgggtcacaagg

SEQ ID NO: 1506 - RNA, 20 nt, synthetic construct
  misc_feature 1..20: note = synthesized
  source 1..20: mol_type = other RNA
cccttgtgacccaataggct

SEQ ID NO: 1507 - RNA, 20 nt, synthetic construct
  misc_feature 1..20: note = synthesized
  source 1..20: mol_type = other RNA
cctattgggtcacaagaggc

SEQ ID NO: 1508 - RNA, 20 nt, synthetic construct
  misc_feature 1..20: note = synthesized
  source 1..20: mol_type = other RNA
cctattgggtcacaaggggc

SEQ ID NO: 1509 - RNA, 20 nt, synthetic construct
  misc_feature 1..20: note = synthesized
  source 1..20: mol_type = other RNA
ccttgtgacccaataggctg

SEQ ID NO: 1510 - RNA, 20 nt, synthetic construct
  misc_feature 1..20: note = synthesized
  source 1..20: mol_type = other RNA
ctattgggtcacaagaggcc

SEQ ID NO: 1511 - RNA, 20 nt, synthetic construct
  misc_feature 1..20: note = synthesized
  source 1..20: mol_type = other RNA
ctattgggtcacaaggggcc

SEQ ID NO: 1512 - RNA, 20 nt, synthetic construct
  misc_feature 1..20: note = synthesized
  source 1..20: mol_type = other RNA
ctcttgtgacccaataggct

SEQ ID NO: 1513 - RNA, 20 nt, synthetic construct
  misc_feature 1..20: note = synthesized
  source 1..20: mol_type = other RNA
gaggcctaattttcatgcga

SEQ ID NO: 1514 - RNA, 20 nt, synthetic construct
  misc_feature 1..20: note = synthesized
  source 1..20: mol_type = other RNA
gcatgaaaattaggcccctt

SEQ ID NO: 1515 - RNA, 20 nt, synthetic construct
  misc_feature 1..20: note = synthesized
  source 1..20: mol_type = other RNA
gcatgaaaattaggcctctt

SEQ ID NO: 1516 - RNA, 20 nt, synthetic construct
  misc_feature 1..20: note = synthesized
  source 1..20: mol_type = other RNA
gccccttgtgacccaatagg

SEQ ID NO: 1517 - RNA, 20 nt, synthetic construct
  misc_feature 1..20: note = synthesized
  source 1..20: mol_type = other RNA
gcctattgggtcacaagagg

SEQ ID NO: 1518 - RNA, 20 nt, synthetic construct
  misc_feature 1..20: note = synthesized
  source 1..20: mol_type = other RNA
gcctattgggtcacaagggg

SEQ ID NO: 1519 - RNA, 20 nt, synthetic construct
  misc_feature 1..20: note = synthesized
  source 1..20: mol_type = other RNA
gcctcttgtgacccaatagg

SEQ ID NO: 1520 - RNA, 20 nt, synthetic construct
  misc_feature 1..20: note = synthesized
  source 1..20: mol_type = other RNA
ggccccttgtgacccaatag

SEQ ID NO: 1521 - RNA, 20 nt, synthetic construct
  misc_feature 1..20: note = synthesized
  source 1..20: mol_type = other RNA
ggcctcttgtgacccaatag

SEQ ID NO: 1522 - RNA, 20 nt, synthetic construct
  misc_feature 1..20: note = synthesized
  source 1..20: mol_type = other RNA
gggcctaattttcatgcgaa

SEQ ID NO: 1523 - RNA, 20 nt, synthetic construct
  misc_feature 1..20: note = synthesized
  source 1..20: mol_type = other RNA
ggggcctaattttcatgcga

SEQ ID NO: 1524 - RNA, 20 nt, synthetic construct
  misc_feature 1..20: note = synthesized
  source 1..20: mol_type = other RNA
gggtcacaagaggcctaatt

SEQ ID NO: 1525 - RNA, 20 nt, synthetic construct
  misc_feature 1..20: note = synthesized
  source 1..20: mol_type = other RNA
gggtcacaaggggcctaatt

SEQ ID NO: 1526 - RNA, 20 nt, synthetic construct
  misc_feature 1..20: note = synthesized
  source 1..20: mol_type = other RNA
ggtcacaagaggcctaattt

SEQ ID NO: 1527 - RNA, 20 nt, synthetic construct
  misc_feature 1..20: note = synthesized
  source 1..20: mol_type = other RNA
ggtcacaaggggcctaattt

SEQ ID NO: 1528 - RNA, 20 nt, synthetic construct
  misc_feature 1..20: note = synthesized
  source 1..20: mol_type = other RNA
gtcacaagaggcctaatttt

SEQ ID NO: 1529 - RNA, 20 nt, synthetic construct
  misc_feature 1..20: note = synthesized
  source 1..20: mol_type = other RNA
gtcacaaggggcctaatttt

SEQ ID NO: 1530 - RNA, 20 nt, synthetic construct
  misc_feature 1..20: note = synthesized
  source 1..20: mol_type = other RNA
tattgggtcacaagaggcct

SEQ ID NO: 1531 - RNA, 20 nt, synthetic construct
  misc_feature 1..20: note = synthesized
  source 1..20: mol_type = other RNA
tattgggtcacaaggggcct

SEQ ID NO: 1532 - RNA, 20 nt, synthetic construct
  misc_feature 1..20: note = synthesized
  source 1..20: mol_type = other RNA
tcacaagaggcctaattttc

SEQ ID NO: 1533 - RNA, 20 nt, synthetic construct
  misc_feature 1..20: note = synthesized
  source 1..20: mol_type = other RNA
tcacaaggggcctaattttc

SEQ ID NO: 1534 - RNA, 20 nt, synthetic construct
  misc_feature 1..20: note = synthesized
  source 1..20: mol_type = other RNA
tcgcatgaaaattaggcccc

SEQ ID NO: 1535 - RNA, 20 nt, synthetic construct
  misc_feature 1..20: note = synthesized
  source 1..20: mol_type = other RNA
tcgcatgaaaattaggcctc

SEQ ID NO: 1536 - RNA, 20 nt, synthetic construct
  misc_feature 1..20: note = synthesized
  source 1..20: mol_type = other RNA
tcttgtgacccaataggctg

SEQ ID NO: 1537 - RNA, 20 nt, synthetic construct
  misc_feature 1..20: note = synthesized
  source 1..20: mol_type = other RNA
tgaaaattaggccccttgtg

SEQ ID NO: 1538 - RNA, 20 nt, synthetic construct
  misc_feature 1..20: note = synthesized
  source 1..20: mol_type = other RNA
tgaaaattaggcctcttgtg

SEQ ID NO: 1539 - RNA, 20 nt, synthetic construct
  misc_feature 1..20: note = synthesized
  source 1..20: mol_type = other RNA
tgggtcacaagaggcctaat

SEQ ID NO: 1540 - RNA, 20 nt, synthetic construct
  misc_feature 1..20: note = synthesized
  source 1..20: mol_type = other RNA
tgggtcacaaggggcctaat

SEQ ID NO: 1541 - RNA, 20 nt, synthetic construct
  misc_feature 1..20: note = synthesized
  source 1..20: mol_type = other RNA
ttaggccccttgtgacccaa

SEQ ID NO: 1542 - RNA, 20 nt, synthetic construct
  misc_feature 1..20: note = synthesized
  source 1..20: mol_type = other RNA
ttaggcctcttgtgacccaa

SEQ ID NO: 1543 - RNA, 20 nt, synthetic construct
  misc_feature 1..20: note = synthesized
  source 1..20: mol_type = other RNA
ttcgcatgaaaattaggccc

SEQ ID NO: 1544 - RNA, 20 nt, synthetic construct
  misc_feature 1..20: note = synthesized
  source 1..20: mol_type = other RNA
ttcgcatgaaaattaggcct

SEQ ID NO: 1545 - RNA, 20 nt, synthetic construct
  misc_feature 1..20: note = synthesized
  source 1..20: mol_type = other RNA
ttgggtcacaagaggcctaa

SEQ ID NO: 1546 - RNA, 20 nt, synthetic construct
  misc_feature 1..20: note = synthesized
  source 1..20: mol_type = other RNA
ttgggtcacaaggggcctaa

SEQ ID NO: 1547 - RNA, 20 nt, synthetic construct
  misc_feature 1..20: note = synthesized
  source 1..20: mol_type = other RNA
aacctctaactagtcctctt

SEQ ID NO: 1548 - RNA, 20 nt, synthetic construct
  misc_feature 1..20: note = synthesized
  source 1..20: mol_type = other RNA
aagaggactagttagaggtc

SEQ ID NO: 1549 - RNA, 20 nt, synthetic construct
  misc_feature 1..20: note = synthesized
  source 1..20: mol_type = other RNA
aagaggactagttagaggtt

SEQ ID NO: 1550 - RNA, 20 nt, synthetic construct
  misc_feature 1..20: note = synthesized
  source 1..20: mol_type = other RNA
actagttagaggtcgcagag

SEQ ID NO: 1551 - RNA, 20 nt, synthetic construct
  misc_feature 1..20: note = synthesized
  source 1..20: mol_type = other RNA
actagttagaggttgcagag

SEQ ID NO: 1552 - RNA, 20 nt, synthetic construct
  misc_feature 1..20: note = synthesized
  source 1..20: mol_type = other RNA
agaggactagttagaggtcg

SEQ ID NO: 1553 - RNA, 20 nt, synthetic construct
  misc_feature 1..20: note = synthesized
  source 1..20: mol_type = other RNA
agaggactagttagaggttg

SEQ ID NO: 1554 - RNA, 20 nt, synthetic construct
  misc_feature 1..20: note = synthesized
  source 1..20: mol_type = other RNA
agagtttctctgcaacctct

SEQ ID NO: 1555 - RNA, 20 nt, synthetic construct
  misc_feature 1..20: note = synthesized
  source 1..20: mol_type = other RNA
agagtttctctgcgacctct

SEQ ID NO: 1556 - RNA, 20 nt, synthetic construct
  misc_feature 1..20: note = synthesized
  source 1..20: mol_type = other RNA
aggactagttagaggtcgca

SEQ ID NO: 1557 - RNA, 20 nt, synthetic construct
  misc_feature 1..20: note = synthesized
  source 1..20: mol_type = other RNA
aggactagttagaggttgca

SEQ ID NO: 1558 - RNA, 20 nt, synthetic construct
  misc_feature 1..20: note = synthesized
  source 1..20: mol_type = other RNA
aggtcgcagagaaactctgg

SEQ ID NO: 1559 - RNA, 20 nt, synthetic construct
  misc_feature 1..20: note = synthesized
  source 1..20: mol_type = other RNA
aggttgcagagaaactctgg

SEQ ID NO: 1560 - RNA, 20 nt, synthetic construct
  misc_feature 1..20: note = synthesized
  source 1..20: mol_type = other RNA
agttagaggtcgcagagaaa

SEQ ID NO: 1561 - RNA, 20 nt, synthetic construct
  misc_feature 1..20: note = synthesized
  source 1..20: mol_type = other RNA
agttagaggttgcagagaaa

SEQ ID NO: 1562 - RNA, 20 nt, synthetic construct
  misc_feature 1..20: note = synthesized
  source 1..20: mol_type = other RNA
agtttctctgcaacctctaa

SEQ ID NO: 1563 - RNA, 20 nt, synthetic construct
  misc_feature 1..20: note = synthesized
  source 1..20: mol_type = other RNA
agtttctctgcgacctctaa

SEQ ID NO: 1564 - RNA, 20 nt, synthetic construct
  misc_feature 1..20: note = synthesized
  source 1..20: mol_type = other RNA
attccagagtttctctgcaa

SEQ ID NO: 1565 - RNA, 20 nt, synthetic construct
  misc_feature 1..20: note = synthesized
  source 1..20: mol_type = other RNA
attccagagtttctctgcga

SEQ ID NO: 1566 - RNA, 20 nt, synthetic construct
  misc_feature 1..20: note = synthesized
  source 1..20: mol_type = other RNA
caacctctaactagtcctct

SEQ ID NO: 1567 - RNA, 20 nt, synthetic construct
  misc_feature 1..20: note = synthesized
  source 1..20: mol_type = other RNA
cagagtttctctgcaacctc

SEQ ID NO: 1568 - RNA, 20 nt, synthetic construct
  misc_feature 1..20: note = synthesized
  source 1..20: mol_type = other RNA
cagagtttctctgcgacctc

SEQ ID NO: 1569 - RNA, 20 nt, synthetic construct
  misc_feature 1..20: note = synthesized
  source 1..20: mol_type = other RNA
cattccagagtttctctgca

SEQ ID NO: 1570 - RNA, 20 nt, synthetic construct
  misc_feature 1..20: note = synthesized
  source 1..20: mol_type = other RNA
cattccagagtttctctgcg

SEQ ID NO: 1571 - RNA, 20 nt, synthetic construct
  misc_feature 1..20: note = synthesized
  source 1..20: mol_type = other RNA
ccagagtttctctgcaacct

SEQ ID NO: 1572 - RNA, 20 nt, synthetic construct
  misc_feature 1..20: note = synthesized
  source 1..20: mol_type = other RNA
ccagagtttctctgcgacct

SEQ ID NO: 1573 - RNA, 20 nt, synthetic construct
  misc_feature 1..20: note = synthesized
  source 1..20: mol_type = other RNA
cgacctctaactagtcctct

SEQ ID NO: 1574 - RNA, 20 nt, synthetic construct
  misc_feature 1..20: note = synthesized
  source 1..20: mol_type = other RNA
ctagttagaggtcgcagaga

SEQ ID NO: 1575 - RNA, 20 nt, synthetic construct
  misc_feature 1..20: note = synthesized
  source 1..20: mol_type = other RNA
ctagttagaggttgcagaga

SEQ ID NO: 1576 - RNA, 20 nt, synthetic construct
  misc_feature 1..20: note = synthesized
  source 1..20: mol_type = other RNA
ctctgcaacctctaactagt

SEQ ID NO: 1577 - RNA, 20 nt, synthetic construct
  misc_feature 1..20: note = synthesized
  source 1..20: mol_type = other RNA
ctctgcgacctctaactagt

SEQ ID NO: 1578 - RNA, 20 nt, synthetic construct
  misc_feature 1..20: note = synthesized
  source 1..20: mol_type = other RNA
ctgcaacctctaactagtcc

SEQ ID NO: 1579 - RNA, 20 nt, synthetic construct
  misc_feature 1..20: note = synthesized
  source 1..20: mol_type = other RNA
ctgcgacctctaactagtcc

SEQ ID NO: 1580 - RNA, 20 nt, synthetic construct
  misc_feature 1..20: note = synthesized
  source 1..20: mol_type = other RNA
gacctctaactagtcctctt

SEQ ID NO: 1581 - RNA, 20 nt, synthetic construct
  misc_feature 1..20: note = synthesized
  source 1..20: mol_type = other RNA
gactagttagaggtcgcaga

SEQ ID NO: 1582 - RNA, 20 nt, synthetic construct
  misc_feature 1..20: note = synthesized
  source 1..20: mol_type = other RNA
gactagttagaggttgcaga

SEQ ID NO: 1583 - RNA, 20 nt, synthetic construct
  misc_feature 1..20: note = synthesized
  source 1..20: mol_type = other RNA
gaggtcgcagagaaactctg

SEQ ID NO: 1584 - RNA, 20 nt, synthetic construct
  misc_feature 1..20: note = synthesized
  source 1..20: mol_type = other RNA
gaggttgcagagaaactctg

SEQ ID NO: 1585 - RNA, 20 nt, synthetic construct
  misc_feature 1..20: note = synthesized
  source 1..20: mol_type = other RNA
gcaacctctaactagtcctc

SEQ ID NO: 1586 - RNA, 20 nt, synthetic construct
  misc_feature 1..20: note = synthesized
  source 1..20: mol_type = other RNA
gcgacctctaactagtcctc

SEQ ID NO: 1587 - RNA, 20 nt, synthetic construct
  misc_feature 1..20: note = synthesized
  source 1..20: mol_type = other RNA
ggtcgcagagaaactctgga

SEQ ID NO: 1588 - RNA, 20 nt, synthetic construct
  misc_feature 1..20: note = synthesized
  source 1..20: mol_type = other RNA
ggttgcagagaaactctgga

SEQ ID NO: 1589 - RNA, 20 nt, synthetic construct
  misc_feature 1..20: note = synthesized
  source 1..20: mol_type = other RNA
gttagaggtcgcagagaaac

SEQ ID NO: 1590 - RNA, 20 nt, synthetic construct
  misc_feature 1..20: note = synthesized
  source 1..20: mol_type = other RNA
gttagaggttgcagagaaac

SEQ ID NO: 1591 - RNA, 20 nt, synthetic construct
  misc_feature 1..20: note = synthesized
  source 1..20: mol_type = other RNA
gtttctctgcaacctctaac

SEQ ID NO: 1592 - RNA, 20 nt, synthetic construct
  misc_feature 1..20: note = synthesized
  source 1..20: mol_type = other RNA
gtttctctgcgacctctaac

SEQ ID NO: 1593 - RNA, 20 nt, synthetic construct
  misc_feature 1..20: note = synthesized
  source 1..20: mol_type = other RNA
tagttagaggtcgcagagaa

SEQ ID NO: 1594 - RNA, 20 nt, synthetic construct
  misc_feature 1..20: note = synthesized
  source 1..20: mol_type = other RNA
tagttagaggttgcagagaa

SEQ ID NO: 1595 - RNA, 20 nt, synthetic construct
  misc_feature 1..20: note = synthesized
  source 1..20: mol_type = other RNA
tccagagtttctctgcaacc

SEQ ID NO: 1596 - RNA, 20 nt, synthetic construct
  misc_feature 1..20: note = synthesized
  source 1..20: mol_type = other RNA
tccagagtttctctgcgacc

SEQ ID NO: 1597 - RNA, 20 nt, synthetic construct
  misc_feature 1..20: note = synthesized
  source 1..20: mol_type = other RNA
tctctgcaacctctaactag

SEQ ID NO: 1598 - RNA, 20 nt, synthetic construct
  misc_feature 1..20: note = synthesized
  source 1..20: mol_type = other RNA
tctctgcgacctctaactag

SEQ ID NO: 1599 - RNA, 20 nt, synthetic construct
  misc_feature 1..20: note = synthesized
  source 1..20: mol_type = other RNA
tctgcaacctctaactagtc

SEQ ID NO: 1600 - RNA, 20 nt, synthetic construct
  misc_feature 1..20: note = synthesized
  source 1..20: mol_type = other RNA
tctgcgacctctaactagtc

SEQ ID NO: 1601 - RNA, 20 nt, synthetic construct
  misc_feature 1..20: note = synthesized
  source 1..20: mol_type = other RNA
tgcaacctctaactagtcct

SEQ ID NO: 1602 - RNA, 20 nt, synthetic construct
  misc_feature 1..20: note = synthesized
  source 1..20: mol_type = other RNA
tgcgacctctaactagtcct

SEQ ID NO: 1603 - RNA, 20 nt, synthetic construct
  misc_feature 1..20: note = synthesized
  source 1..20: mol_type = other RNA
ttagaggtcgcagagaaact

SEQ ID NO: 1604 - RNA, 20 nt, synthetic construct
  misc_feature 1..20: note = synthesized
  source 1..20: mol_type = other RNA
ttagaggttgcagagaaact

SEQ ID NO: 1605 - RNA, 20 nt, synthetic construct
  misc_feature 1..20: note = synthesized
  source 1..20: mol_type = other RNA
ttccagagtttctctgcaac

SEQ ID NO: 1606 - RNA, 20 nt, synthetic construct
  misc_feature 1..20: note = synthesized
  source 1..20: mol_type = other RNA
ttccagagtttctctgcgac

SEQ ID NO: 1607 - RNA, 20 nt, synthetic construct
  misc_feature 1..20: note = synthesized
  source 1..20: mol_type = other RNA
ttctctgcaacctctaacta

SEQ ID NO: 1608 - RNA, 20 nt, synthetic construct
  misc_feature 1..20: note = synthesized
  source 1..20: mol_type = other RNA
ttctctgcgacctctaacta

SEQ ID NO: 1609 - RNA, 20 nt, synthetic construct
  misc_feature 1..20: note = synthesized
  source 1..20: mol_type = other RNA
tttctctgcaacctctaact

SEQ ID NO: 1610 - RNA, 20 nt, synthetic construct
  misc_feature 1..20: note = synthesized
  source 1..20: mol_type = other RNA
tttctctgcgacctctaact

SEQ ID NO: 1611 - RNA, 20 nt, synthetic construct
  misc_feature 1..20: note = synthesized
  source 1..20: mol_type = other RNA
aacttcacatctctggaacc

SEQ ID NO: 1612 - RNA, 20 nt, synthetic construct
  misc_feature 1..20: note = synthesized
  source 1..20: mol_type = other RNA
aacttcgcatctctggaacc

SEQ ID NO: 1613 - RNA, 20 nt, synthetic construct
  misc_feature 1..20: note = synthesized
  source 1..20: mol_type = other RNA
aagtgggttccagagatgcg

SEQ ID NO: 1614 - RNA, 20 nt, synthetic construct
  misc_feature 1..20: note = synthesized
  source 1..20: mol_type = other RNA
aagtgggttccagagatgtg

SEQ ID NO: 1615 - RNA, 20 nt, synthetic construct
  misc_feature 1..20: note = synthesized
  source 1..20: mol_type = other RNA
acatctctggaacccactta

SEQ ID NO: 1616 - RNA, 20 nt, synthetic construct
  misc_feature 1..20: note = synthesized
  source 1..20: mol_type = other RNA
acttcacatctctggaaccc

SEQ ID NO: 1617 - RNA, 20 nt, synthetic construct
  misc_feature 1..20: note = synthesized
  source 1..20: mol_type = other RNA
acttcgcatctctggaaccc

SEQ ID NO: 1618 - RNA, 20 nt, synthetic construct
  misc_feature 1..20: note = synthesized
  source 1..20: mol_type = other RNA
agagatgcgaagttgcctgg

SEQ ID NO: 1619 - RNA, 20 nt, synthetic construct
  misc_feature 1..20: note = synthesized
  source 1..20: mol_type = other RNA
agagatgtgaagttgcctgg

SEQ ID NO: 1620 - RNA, 20 nt, synthetic construct
  misc_feature 1..20: note = synthesized
  source 1..20: mol_type = other RNA
agatgcgaagttgcctggct

SEQ ID NO: 1621 - RNA, 20 nt, synthetic construct
  misc_feature 1..20: note = synthesized
  source 1..20: mol_type = other RNA
agatgtgaagttgcctggct

SEQ ID NO: 1622 - RNA, 20 nt, synthetic construct
  misc_feature 1..20: note = synthesized
  source 1..20: mol_type = other RNA
agccaggcaacttcacatct

SEQ ID NO: 1623 - RNA, 20 nt, synthetic construct
  misc_feature 1..20: note = synthesized
  source 1..20: mol_type = other RNA
agccaggcaacttcgcatct

SEQ ID NO: 1624 - RNA, 20 nt, synthetic construct
  misc_feature 1..20: note = synthesized
  source 1..20: mol_type = other RNA
aggcaacttcacatctctgg

SEQ ID NO: 1625 - RNA, 20 nt, synthetic construct
  misc_feature 1..20: note = synthesized
  source 1..20: mol_type = other RNA
aggcaacttcgcatctctgg

SEQ ID NO: 1626 - RNA, 20 nt, synthetic construct
  misc_feature 1..20: note = synthesized
  source 1..20: mol_type = other RNA
aggcagccaggcaacttcac

SEQ ID NO: 1627 - RNA, 20 nt, synthetic construct
  misc_feature 1..20: note = synthesized
  source 1..20: mol_type = other RNA
aggcagccaggcaacttcgc

SEQ ID NO: 1628 - RNA, 20 nt, synthetic construct
  misc_feature 1..20: note = synthesized
  source 1..20: mol_type = other RNA
agtgggttccagagatgcga

SEQ ID NO: 1629 - RNA, 20 nt, synthetic construct
  misc_feature 1..20: note = synthesized
  source 1..20: mol_type = other RNA
agtgggttccagagatgtga

SEQ ID NO: 1630 - RNA, 20 nt, synthetic construct
  misc_feature 1..20: note = synthesized
  source 1..20: mol_type = other RNA
atgcgaagttgcctggctgc

SEQ ID NO: 1631 - RNA, 20 nt, synthetic construct
  misc_feature 1..20: note = synthesized
  source 1..20: mol_type = other RNA
atgtgaagttgcctggctgc

SEQ ID NO: 1632 - RNA, 20 nt, synthetic construct
  misc_feature 1..20: note = synthesized
  source 1..20: mol_type = other RNA
caacttcacatctctggaac

SEQ ID NO: 1633 - RNA, 20 nt, synthetic construct
  misc_feature 1..20: note = synthesized
  source 1..20: mol_type = other RNA
caacttcgcatctctggaac

SEQ ID NO: 1634 - RNA, 20 nt, synthetic construct
  misc_feature 1..20: note = synthesized
  source 1..20: mol_type = other RNA
cacatctctggaacccactt

SEQ ID NO: 1635 - RNA, 20 nt, synthetic construct
  misc_feature 1..20: note = synthesized
  source 1..20: mol_type = other RNA
cagagatgcgaagttgcctg

SEQ ID NO: 1636 - RNA, 20 nt, synthetic construct
  misc_feature 1..20: note = synthesized
  source 1..20: mol_type = other RNA
cagagatgtgaagttgcctg

SEQ ID NO: 1637 - RNA, 20 nt, synthetic construct
  misc_feature 1..20: note = synthesized
  source 1..20: mol_type = other RNA
cagccaggcaacttcacatc

SEQ ID NO: 1638 - RNA, 20 nt, synthetic construct
  misc_feature 1..20: note = synthesized
  source 1..20: mol_type = other RNA
cagccaggcaacttcgcatc

SEQ ID NO: 1639 - RNA, 20 nt, synthetic construct
  misc_feature 1..20: note = synthesized
  source 1..20: mol_type = other RNA
caggcaacttcacatctctg

SEQ ID NO: 1640 - RNA, 20 nt, synthetic construct
  misc_feature 1..20: note = synthesized
  source 1..20: mol_type = other RNA
caggcaacttcgcatctctg

SEQ ID NO: 1641 - RNA, 20 nt, synthetic construct
  misc_feature 1..20: note = synthesized
  source 1..20: mol_type = other RNA
ccagagatgcgaagttgcct

SEQ ID NO: 1642 - RNA, 20 nt, synthetic construct
  misc_feature 1..20: note = synthesized
  source 1..20: mol_type = other RNA
ccagagatgtgaagttgcct

SEQ ID NO: 1643 - RNA, 20 nt, synthetic construct
  misc_feature 1..20: note = synthesized
  source 1..20: mol_type = other RNA
cgaagttgcctggctgcctc

SEQ ID NO: 1644 - RNA, 20 nt, synthetic construct
  misc_feature 1..20: note = synthesized
  source 1..20: mol_type = other RNA
cgcatctctggaacccactt

SEQ ID NO: 1645 - RNA, 20 nt, synthetic construct
  misc_feature 1..20: note = synthesized
  source 1..20: mol_type = other RNA
cttcacatctctggaaccca

SEQ ID NO: 1646 - RNA, 20 nt, synthetic construct
  misc_feature 1..20: note = synthesized
  source 1..20: mol_type = other RNA
cttcgcatctctggaaccca

SEQ ID NO: 1647 - RNA, 20 nt, synthetic construct
  misc_feature 1..20: note = synthesized
  source 1..20: mol_type = other RNA
gagatgcgaagttgcctggc

SEQ ID NO: 1648 - RNA, 20 nt, synthetic construct
  misc_feature 1..20: note = synthesized
  source 1..20: mol_type = other RNA
gagatgtgaagttgcctggc

SEQ ID NO: 1649 - RNA, 20 nt, synthetic construct
  misc_feature 1..20: note = synthesized
  source 1..20: mol_type = other RNA
gaggcagccaggcaacttca

SEQ ID NO: 1650 - RNA, 20 nt, synthetic construct
  misc_feature 1..20: note = synthesized
  source 1..20: mol_type = other RNA
gaggcagccaggcaacttcg

SEQ ID NO: 1651 - RNA, 20 nt, synthetic construct
  misc_feature 1..20: note = synthesized
  source 1..20: mol_type = other RNA
gatgcgaagttgcctggctg

SEQ ID NO: 1652 - RNA, 20 nt, synthetic construct
  misc_feature 1..20: note = synthesized
  source 1..20: mol_type = other RNA
gatgtgaagttgcctggctg

SEQ ID NO: 1653 - RNA, 20 nt, synthetic construct
  misc_feature 1..20: note = synthesized
  source 1..20: mol_type = other RNA
gcaacttcacatctctggaa

SEQ ID NO: 1654 - RNA, 20 nt, synthetic construct
  misc_feature 1..20: note = synthesized
  source 1..20: mol_type = other RNA
gcaacttcgcatctctggaa

SEQ ID NO: 1655 - RNA, 20 nt, synthetic construct
  misc_feature 1..20: note = synthesized
  source 1..20: mol_type = other RNA
gcagccaggcaacttcacat

SEQ ID NO: 1656 - RNA, 20 nt, synthetic construct
  misc_feature 1..20: note = synthesized
  source 1..20: mol_type = other RNA
gcagccaggcaacttcgcat

SEQ ID NO: 1657 - RNA, 20 nt, synthetic construct
  misc_feature 1..20: note = synthesized
  source 1..20: mol_type = other RNA
gcatctctggaacccactta

SEQ ID NO: 1658 - RNA, 20 nt, synthetic construct
  misc_feature 1..20: note = synthesized
  source 1..20: mol_type = other RNA
gcgaagttgcctggctgcct

SEQ ID NO: 1659 - RNA, 20 nt, synthetic construct
  misc_feature 1..20: note = synthesized
  source 1..20: mol_type = other RNA
ggcaacttcacatctctgga

SEQ ID NO: 1660 - RNA, 20 nt, synthetic construct
  misc_feature 1..20: note = synthesized
  source 1..20: mol_type = other RNA
ggcaacttcgcatctctgga

SEQ ID NO: 1661 - RNA, 20 nt, synthetic construct
  misc_feature 1..20: note = synthesized
  source 1..20: mol_type = other RNA
ggcagccaggcaacttcaca

SEQ ID NO: 1662 - RNA, 20 nt, synthetic construct
  misc_feature 1..20: note = synthesized
  source 1..20: mol_type = other RNA
ggcagccaggcaacttcgca

SEQ ID NO: 1663 - RNA, 20 nt, synthetic construct
  misc_feature 1..20: note = synthesized
  source 1..20: mol_type = other RNA
gggttccagagatgcgaagt

SEQ ID NO: 1664 - RNA, 20 nt, synthetic construct
  misc_feature 1..20: note = synthesized
  source 1..20: mol_type = other RNA
gggttccagagatgtgaagt

SEQ ID NO: 1665 - RNA, 20 nt, synthetic construct
  misc_feature 1..20: note = synthesized
  source 1..20: mol_type = other RNA
ggttccagagatgcgaagtt

SEQ ID NO: 1666 - RNA, 20 nt, synthetic construct
  misc_feature 1..20: note = synthesized
  source 1..20: mol_type = other RNA
ggttccagagatgtgaagtt

SEQ ID NO: 1667 - RNA, 20 nt, synthetic construct
  misc_feature 1..20: note = synthesized
  source 1..20: mol_type = other RNA
gtgaagttgcctggctgcct

SEQ ID NO: 1668 - RNA, 20 nt, synthetic construct
  misc_feature 1..20: note = synthesized
  source 1..20: mol_type = other RNA
gtgggttccagagatgcgaa

SEQ ID NO: 1669 - RNA, 20 nt, synthetic construct
  misc_feature 1..20: note = synthesized
  source 1..20: mol_type = other RNA
gtgggttccagagatgtgaa

SEQ ID NO: 1670 - RNA, 20 nt, synthetic construct
  misc_feature 1..20: note = synthesized
  source 1..20: mol_type = other RNA
gttccagagatgcgaagttg

SEQ ID NO: 1671 - RNA, 20 nt, synthetic construct
  misc_feature 1..20: note = synthesized
  source 1..20: mol_type = other RNA
gttccagagatgtgaagttg

SEQ ID NO: 1672 - RNA, 20 nt, synthetic construct
  misc_feature 1..20: note = synthesized
  source 1..20: mol_type = other RNA
taagtgggttccagagatgc

SEQ ID NO: 1673 - RNA, 20 nt, synthetic construct
  misc_feature 1..20: note = synthesized
  source 1..20: mol_type = other RNA
taagtgggttccagagatgt

SEQ ID NO: 1674 - RNA, 20 nt, synthetic construct
  misc_feature 1..20: note = synthesized
  source 1..20: mol_type = other RNA
tcacatctctggaacccact

SEQ ID NO: 1675 - RNA, 20 nt, synthetic construct
  misc_feature 1..20: note = synthesized
  source 1..20: mol_type = other RNA
tcgcatctctggaacccact

SEQ ID NO: 1676 - RNA, 20 nt, synthetic construct
  misc_feature 1..20: note = synthesized
  source 1..20: mol_type = other RNA
tgaagttgcctggctgcctc

SEQ ID NO: 1677 - RNA, 20 nt, synthetic construct
  misc_feature 1..20: note = synthesized
  source 1..20: mol_type = other RNA
tgcgaagttgcctggctgcc

SEQ ID NO: 1678 - RNA, 20 nt, synthetic construct
  misc_feature 1..20: note = synthesized
  source 1..20: mol_type = other RNA
tgggttccagagatgcgaag

SEQ ID NO: 1679 - RNA, 20 nt, synthetic construct
  misc_feature 1..20: note = synthesized
  source 1..20: mol_type = other RNA
tgggttccagagatgtgaag

SEQ ID NO: 1680 - RNA, 20 nt, synthetic construct
  misc_feature 1..20: note = synthesized
  source 1..20: mol_type = other RNA
tgtgaagttgcctggctgcc

SEQ ID NO: 1681 - RNA, 20 nt, synthetic construct
  misc_feature 1..20: note = synthesized
  source 1..20: mol_type = other RNA
ttcacatctctggaacccac

SEQ ID NO: 1682 - RNA, 20 nt, synthetic construct
  misc_feature 1..20: note = synthesized
  source 1..20: mol_type = other RNA
ttccagagatgcgaagttgc

SEQ ID NO: 1683 - RNA, 20 nt, synthetic construct
  misc_feature 1..20: note = synthesized
  source 1..20: mol_type = other RNA
ttccagagatgtgaagttgc

SEQ ID NO: 1684 - RNA, 20 nt, synthetic construct
  misc_feature 1..20: note = synthesized
  source 1..20: mol_type = other RNA
ttcgcatctctggaacccac

SEQ ID NO: 1685 - RNA, 20 nt, synthetic construct
  misc_feature 1..20: note = synthesized
  source 1..20: mol_type = other RNA
aactgcattatccctcaaag

SEQ ID NO: 1686 - RNA, 20 nt, synthetic construct
  misc_feature 1..20: note = synthesized
  source 1..20: mol_type = other RNA
aactgcattatctctcaaag

SEQ ID NO: 1687 - RNA, 20 nt, synthetic construct
  misc_feature 1..20: note = synthesized
  source 1..20: mol_type = other RNA
agataatgcagttatatcag

SEQ ID NO: 1688 - RNA, 20 nt, synthetic construct
  misc_feature 1..20: note = synthesized
  source 1..20: mol_type = other RNA
atataactgcattatccctc

SEQ ID NO: 1689 - RNA, 20 nt, synthetic construct
  misc_feature 1..20: note = synthesized
  source 1..20: mol_type = other RNA
atataactgcattatctctc

SEQ ID NO: 1690 - RNA, 20 nt, synthetic construct
  misc_feature 1..20: note = synthesized
  source 1..20: mol_type = other RNA
atccctcaaagaaggaagga

SEQ ID NO: 1691 - RNA, 20 nt, synthetic construct
  misc_feature 1..20: note = synthesized
  source 1..20: mol_type = other RNA
atctctcaaagaaggaagga

SEQ ID NO: 1692 - RNA, 20 nt, synthetic construct
  misc_feature 1..20: note = synthesized
  source 1..20: mol_type = other RNA
ccctcaaagaaggaaggaga

SEQ ID NO: 1693 - RNA, 20 nt, synthetic construct
  misc_feature 1..20: note = synthesized
  source 1..20: mol_type = other RNA
ccttccttctttgagagata

SEQ ID NO: 1694 - RNA, 20 nt, synthetic construct
  misc_feature 1..20: note = synthesized
  source 1..20: mol_type = other RNA
ccttccttctttgagggata

SEQ ID NO: 1695 - RNA, 20 nt, synthetic construct
  misc_feature 1..20: note = synthesized
  source 1..20: mol_type = other RNA
ccttctttgagagataatgc

SEQ ID NO: 1696 - RNA, 20 nt, synthetic construct
  misc_feature 1..20: note = synthesized
  source 1..20: mol_type = other RNA
ccttctttgagggataatgc

SEQ ID NO: 1697 - RNA, 20 nt, synthetic construct
  misc_feature 1..20: note = synthesized
  source 1..20: mol_type = other RNA
ctccttccttctttgagaga

SEQ ID NO: 1698 - RNA, 20 nt, synthetic construct
  misc_feature 1..20: note = synthesized
  source 1..20: mol_type = other RNA
ctccttccttctttgaggga

SEQ ID NO: 1699 - RNA, 20 nt, synthetic construct
  misc_feature 1..20: note = synthesized
  source 1..20: mol_type = other RNA
ctctcaaagaaggaaggaga

SEQ ID NO: 1700 - RNA, 20 nt, synthetic construct
  misc_feature 1..20: note = synthesized
  source 1..20: mol_type = other RNA
ctctccttccttctttgaga

SEQ ID NO: 1701 - RNA, 20 nt, synthetic construct
  misc_feature 1..20: note = synthesized
  source 1..20: mol_type = other RNA
ctctccttccttctttgagg

SEQ ID NO: 1702 - RNA, 20 nt, synthetic construct
  misc_feature 1..20: note = synthesized
  source 1..20: mol_type = other RNA
ctgatataactgcattatcc

SEQ ID NO: 1703 - RNA, 20 nt, synthetic construct
  misc_feature 1..20: note = synthesized
  source 1..20: mol_type = other RNA
ctgatataactgcattatct

SEQ ID NO: 1704 - RNA, 20 nt, synthetic construct
  misc_feature 1..20: note = synthesized
  source 1..20: mol_type = other RNA
cttccttctttgagagataa

SEQ ID NO: 1705 - RNA, 20 nt, synthetic construct
  misc_feature 1..20: note = synthesized
  source 1..20: mol_type = other RNA
cttccttctttgagggataa

SEQ ID NO: 1706 - RNA, 20 nt, synthetic construct
  misc_feature 1..20: note = synthesized
  source 1..20: mol_type = other RNA
cttctttgagagataatgca

SEQ ID NO: 1707 - RNA, 20 nt, synthetic construct
  misc_feature 1..20: note = synthesized
  source 1..20: mol_type = other RNA
cttctttgagggataatgca

SEQ ID NO: 1708 - RNA, 20 nt, synthetic construct
  misc_feature 1..20: note = synthesized
  source 1..20: mol_type = other RNA
ctttgagagataatgcagtt

SEQ ID NO: 1709 - RNA, 20 nt, synthetic construct
  misc_feature 1..20: note = synthesized
  source 1..20: mol_type = other RNA
ctttgagggataatgcagtt

SEQ ID NO: 1710 - RNA, 20 nt, synthetic construct
  misc_feature 1..20: note = synthesized
  source 1..20: mol_type = other RNA
gagataatgcagttatatca

SEQ ID NO: 1711 - RNA, 20 nt, synthetic construct
  misc_feature 1..20: note = synthesized
  source 1..20: mol_type = other RNA
gatataactgcattatccct

SEQ ID NO: 1712 - RNA, 20 nt, synthetic construct
  misc_feature 1..20: note = synthesized
  source 1..20: mol_type = other RNA
gatataactgcattatctct

SEQ ID NO: 1713 - RNA, 20 nt, synthetic construct
  misc_feature 1..20: note = synthesized
  source 1..20: mol_type = other RNA
gcattatccctcaaagaagg

SEQ ID NO: 1714 - RNA, 20 nt, synthetic construct
  misc_feature 1..20: note = synthesized
  source 1..20: mol_type = other RNA
gcattatctctcaaagaagg

SEQ ID NO: 1715 - RNA, 20 nt, synthetic construct
  misc_feature 1..20: note = synthesized
  source 1..20: mol_type = other RNA
ggataatgcagttatatcag

SEQ ID NO: 1716 - RNA, 20 nt, synthetic construct
  misc_feature 1..20: note = synthesized
  source 1..20: mol_type = other RNA
gggataatgcagttatatca

SEQ ID NO: 1717 - RNA, 20 nt, synthetic construct
  misc_feature 1..20: note = synthesized
  source 1..20: mol_type = other RNA
taactgcattatccctcaaa

SEQ ID NO: 1718 - RNA, 20 nt, synthetic construct
  misc_feature 1..20: note = synthesized
  source 1..20: mol_type = other RNA
taactgcattatctctcaaa

SEQ ID NO: 1719 - RNA, 20 nt, synthetic construct
  misc_feature 1..20: note = synthesized
  source 1..20: mol_type = other RNA
tataactgcattatccctca

SEQ ID NO: 1720 - RNA, 20 nt, synthetic construct
  misc_feature 1..20: note = synthesized
  source 1..20: mol_type = other RNA
tataactgcattatctctca

SEQ ID NO: 1721 - RNA, 20 nt, synthetic construct
  misc_feature 1..20: note = synthesized
  source 1..20: mol_type = other RNA
tccttccttctttgagagat

SEQ ID NO: 1722 - RNA, 20 nt, synthetic construct
  misc_feature 1..20: note = synthesized
  source 1..20: mol_type = other RNA
tccttccttctttgagggat

SEQ ID NO: 1723 - RNA, 20 nt, synthetic construct
  misc_feature 1..20: note = synthesized
  source 1..20: mol_type = other RNA
tccttctttgagagataatg

SEQ ID NO: 1724 - RNA, 20 nt, synthetic construct
  misc_feature 1..20: note = synthesized
  source 1..20: mol_type = other RNA
tccttctttgagggataatg

SEQ ID NO: 1725 - RNA, 20 nt, synthetic construct
  misc_feature 1..20: note = synthesized
  source 1..20: mol_type = other RNA
tctccttccttctttgagag

SEQ ID NO: 1726 - RNA, 20 nt, synthetic construct
  misc_feature 1..20: note = synthesized
  source 1..20: mol_type = other RNA
tctccttccttctttgaggg

SEQ ID NO: 1727 - RNA, 20 nt, synthetic construct
  misc_feature 1..20: note = synthesized
  source 1..20: mol_type = other RNA
tctttgagagataatgcagt

SEQ ID NO: 1728 - RNA, 20 nt, synthetic construct
  misc_feature 1..20: note = synthesized
  source 1..20: mol_type = other RNA
tctttgagggataatgcagt

SEQ ID NO: 1729 - RNA, 20 nt, synthetic construct
  misc_feature 1..20: note = synthesized
  source 1..20: mol_type = other RNA
tgagagataatgcagttata

SEQ ID NO: 1730 - RNA, 20 nt, synthetic construct
  misc_feature 1..20: note = synthesized
  source 1..20: mol_type = other RNA
tgagggataatgcagttata

SEQ ID NO: 1731 - RNA, 20 nt, synthetic construct
  misc_feature 1..20: note = synthesized
  source 1..20: mol_type = other RNA
tgatataactgcattatccc

SEQ ID NO: 1732 - RNA, 20 nt, synthetic construct
  misc_feature 1..20: note = synthesized
  source 1..20: mol_type = other RNA
tgatataactgcattatctc

SEQ ID NO: 1733 - RNA, 20 nt, synthetic construct
  misc_feature 1..20: note = synthesized
  source 1..20: mol_type = other RNA
tgcattatccctcaaagaag

SEQ ID NO: 1734 - RNA, 20 nt, synthetic construct
  misc_feature 1..20: note = synthesized
  source 1..20: mol_type = other RNA
tgcattatctctcaaagaag

SEQ ID NO: 1735 - RNA, 20 nt, synthetic construct
  misc_feature 1..20: note = synthesized
  source 1..20: mol_type = other RNA
ttatccctcaaagaaggaag

SEQ ID NO: 1736 - RNA, 20 nt, synthetic construct
  misc_feature 1..20: note = synthesized
  source 1..20: mol_type = other RNA
ttatctctcaaagaaggaag

SEQ ID NO: 1737 - RNA, 20 nt, synthetic construct
  misc_feature 1..20: note = synthesized
  source 1..20: mol_type = other RNA
ttccttctttgagagataat

SEQ ID NO: 1738 - RNA, 20 nt, synthetic construct
  misc_feature 1..20: note = synthesized
  source 1..20: mol_type = other RNA
ttccttctttgagggataat

SEQ ID NO: 1739 - RNA, 20 nt, synthetic construct
  misc_feature 1..20: note = synthesized
  source 1..20: mol_type = other RNA
ttctttgagagataatgcag

SEQ ID NO: 1740 - RNA, 20 nt, synthetic construct
  misc_feature 1..20: note = synthesized
  source 1..20: mol_type = other RNA
ttctttgagggataatgcag

SEQ ID NO: 1741 - RNA, 20 nt, synthetic construct
  misc_feature 1..20: note = synthesized
  source 1..20: mol_type = other RNA
ttgagagataatgcagttat

SEQ ID NO: 1742 - RNA, 20 nt, synthetic construct
  misc_feature 1..20: note = synthesized
  source 1..20: mol_type = other RNA
ttgagggataatgcagttat

SEQ ID NO: 1743 - RNA, 20 nt, synthetic construct
  misc_feature 1..20: note = synthesized
  source 1..20: mol_type = other RNA
tttgagagataatgcagtta

SEQ ID NO: 1744 - RNA, 20 nt, synthetic construct
  misc_feature 1..20: note = synthesized
  source 1..20: mol_type = other RNA
tttgagggataatgcagtta

SEQ ID NO: 1745 - RNA, 20 nt, synthetic construct
  misc_feature 1..20: note = synthesized
  source 1..20: mol_type = other RNA
aaatcctgtctgttcaccca

SEQ ID NO: 1746 - RNA, 20 nt, synthetic construct
  misc_feature 1..20: note = synthesized
  source 1..20: mol_type = other RNA
aacagacaggacttcagttg

SEQ ID NO: 1747 - RNA, 20 nt, synthetic construct
  misc_feature 1..20: note = synthesized
  source 1..20: mol_type = other RNA
aacagacaggatttcagttg

SEQ ID NO: 1748 - RNA, 20 nt, synthetic construct
  misc_feature 1..20: note = synthesized
  source 1..20: mol_type = other RNA
aactgaaatcctgtctgttc

SEQ ID NO: 1749 - RNA, 20 nt, synthetic construct
  misc_feature 1..20: note = synthesized
  source 1..20: mol_type = other RNA
aactgaagtcctgtctgttc

SEQ ID NO: 1750 - RNA, 20 nt, synthetic construct
  misc_feature 1..20: note = synthesized
  source 1..20: mol_type = other RNA
aagtcctgtctgttcaccca

SEQ ID NO: 1751 - RNA, 20 nt, synthetic construct
  misc_feature 1..20: note = synthesized
  source 1..20: mol_type = other RNA
aatcctgtctgttcacccac

SEQ ID NO: 1752 - RNA, 20 nt, synthetic construct
  misc_feature 1..20: note = synthesized
  source 1..20: mol_type = other RNA
acagacaggacttcagttgc

SEQ ID NO: 1753 - RNA, 20 nt, synthetic construct
  misc_feature 1..20: note = synthesized
  source 1..20: mol_type = other RNA
acagacaggatttcagttgc

SEQ ID NO: 1754 - RNA, 20 nt, synthetic construct
  misc_feature 1..20: note = synthesized
  source 1..20: mol_type = other RNA
actgaaatcctgtctgttca

SEQ ID NO: 1755 - RNA, 20 nt, synthetic construct
  misc_feature 1..20: note = synthesized
  source 1..20: mol_type = other RNA
actgaagtcctgtctgttca

SEQ ID NO: 1756 - RNA, 20 nt, synthetic construct
  misc_feature 1..20: note = synthesized
  source 1..20: mol_type = other RNA
agacaggacttcagttgcat

SEQ ID NO: 1757 - RNA, 20 nt, synthetic construct
  misc_feature 1..20: note = synthesized
  source 1..20: mol_type = other RNA
agacaggatttcagttgcat

SEQ ID NO: 1758 - RNA, 20 nt, synthetic construct
  misc_feature 1..20: note = synthesized
  source 1..20: mol_type = other RNA
agcatgcaactgaaatcctg

SEQ ID NO: 1759 - RNA, 20 nt, synthetic construct
  misc_feature 1..20: note = synthesized
  source 1..20: mol_type = other RNA
agcatgcaactgaagtcctg

SEQ ID NO: 1760 - RNA, 20 nt, synthetic construct
  misc_feature 1..20: note = synthesized
  source 1..20: mol_type = other RNA
agtcctgtctgttcacccac

SEQ ID NO: 1761 - RNA, 20 nt, synthetic construct
  misc_feature 1..20: note = synthesized
  source 1..20: mol_type = other RNA
agtgggtgaacagacaggac

SEQ ID NO: 1762 - RNA, 20 nt, synthetic construct
  misc_feature 1..20: note = synthesized
  source 1..20: mol_type = other RNA
agtgggtgaacagacaggat

SEQ ID NO: 1763 - RNA, 20 nt, synthetic construct
  misc_feature 1..20: note = synthesized
  source 1..20: mol_type = other RNA
caactgaaatcctgtctgtt

SEQ ID NO: 1764 - RNA, 20 nt, synthetic construct
  misc_feature 1..20: note = synthesized
  source 1..20: mol_type = other RNA
caactgaagtcctgtctgtt

SEQ ID NO: 1765 - RNA, 20 nt, synthetic construct
  misc_feature 1..20: note = synthesized
  source 1..20: mol_type = other RNA
cagacaggacttcagttgca

SEQ ID NO: 1766 - RNA, 20 nt, synthetic construct
  misc_feature 1..20: note = synthesized
  source 1..20: mol_type = other RNA
cagacaggatttcagttgca

SEQ ID NO: 1767 - RNA, 20 nt, synthetic construct
  misc_feature 1..20: note = synthesized
  source 1..20: mol_type = other RNA
caggacttcagttgcatgct

SEQ ID NO: 1768 - RNA, 20 nt, synthetic construct
  misc_feature 1..20: note = synthesized
  source 1..20: mol_type = other RNA
caggatttcagttgcatgct

SEQ ID NO: 1769 - RNA, 20 nt, synthetic construct
  misc_feature 1..20: note = synthesized
  source 1..20: mol_type = other RNA
catgcaactgaaatcctgtc

SEQ ID NO: 1770 - RNA, 20 nt, synthetic construct
  misc_feature 1..20: note = synthesized
  source 1..20: mol_type = other RNA
catgcaactgaagtcctgtc

SEQ ID NO: 1771 - RNA, 20 nt, synthetic construct
  misc_feature 1..20: note = synthesized
  source 1..20: mol_type = other RNA
cctgagcatgcaactgaaat

SEQ ID NO: 1772 - RNA, 20 nt, synthetic construct
  misc_feature 1..20: note = synthesized
  source 1..20: mol_type = other RNA
cctgagcatgcaactgaagt

SEQ ID NO: 1773 - RNA, 20 nt, synthetic construct
  misc_feature 1..20: note = synthesized
  source 1..20: mol_type = other RNA
ctgaaatcctgtctgttcac

SEQ ID NO: 1774 - RNA, 20 nt, synthetic construct
  misc_feature 1..20: note = synthesized
  source 1..20: mol_type = other RNA
ctgaagtcctgtctgttcac

SEQ ID NO: 1775 - RNA, 20 nt, synthetic construct
  misc_feature 1..20: note = synthesized
  source 1..20: mol_type = other RNA
ctgagcatgcaactgaaatc

SEQ ID NO: 1776 - RNA, 20 nt, synthetic construct
  misc_feature 1..20: note = synthesized
  source 1..20: mol_type = other RNA
ctgagcatgcaactgaagtc

SEQ ID NO: 1777 - RNA, 20 nt, synthetic construct
  misc_feature 1..20: note = synthesized
  source 1..20: mol_type = other RNA
cttcagttgcatgctcaggc

SEQ ID NO: 1778 - RNA, 20 nt, synthetic construct
  misc_feature 1..20: note = synthesized
  source 1..20: mol_type = other RNA
gaaatcctgtctgttcaccc

SEQ ID NO: 1779 - RNA, 20 nt, synthetic construct
  misc_feature 1..20: note = synthesized
  source 1..20: mol_type = other RNA
gaacagacaggacttcagtt

SEQ ID NO: 1780 - RNA, 20 nt, synthetic construct
  misc_feature 1..20: note = synthesized
  source 1..20: mol_type = other RNA
gaacagacaggatttcagtt

SEQ ID NO: 1781 - RNA, 20 nt, synthetic construct
  misc_feature 1..20: note = synthesized
  source 1..20: mol_type = other RNA
gaagtcctgtctgttcaccc

SEQ ID NO: 1782 - RNA, 20 nt, synthetic construct
  misc_feature 1..20: note = synthesized
  source 1..20: mol_type = other RNA
gacaggacttcagttgcatg

SEQ ID NO: 1783 - RNA, 20 nt, synthetic construct
  misc_feature 1..20: note = synthesized
  source 1..20: mol_type = other RNA
gacaggatttcagttgcatg

SEQ ID NO: 1784 - RNA, 20 nt, synthetic construct
  misc_feature 1..20: note = synthesized
  source 1..20: mol_type = other RNA
gacttcagttgcatgctcag

SEQ ID NO: 1785 - RNA, 20 nt, synthetic construct
  misc_feature 1..20: note = synthesized
  source 1..20: mol_type = other RNA
gagcatgcaactgaaatcct

SEQ ID NO: 1786 - RNA, 20 nt, synthetic construct
  misc_feature 1..20: note = synthesized
  source 1..20: mol_type = other RNA
gagcatgcaactgaagtcct

SEQ ID NO: 1787 - RNA, 20 nt, synthetic construct
  misc_feature 1..20: note = synthesized
  source 1..20: mol_type = other RNA
gatttcagttgcatgctcag

SEQ ID NO: 1788 - RNA, 20 nt, synthetic construct
  misc_feature 1..20: note = synthesized
  source 1..20: mol_type = other RNA
gcaactgaaatcctgtctgt

SEQ ID NO: 1789 - RNA, 20 nt, synthetic construct
  misc_feature 1..20: note = synthesized
  source 1..20: mol_type = other RNA
gcaactgaagtcctgtctgt

SEQ ID NO: 1790 - RNA, 20 nt, synthetic construct
  misc_feature 1..20: note = synthesized
  source 1..20: mol_type = other RNA
gcatgcaactgaaatcctgt

SEQ ID NO: 1791 - RNA, 20 nt, synthetic construct
  misc_feature 1..20: note = synthesized
  source 1..20: mol_type = other RNA
gcatgcaactgaagtcctgt

SEQ ID NO: 1792 - RNA, 20 nt, synthetic construct
  misc_feature 1..20: note = synthesized
  source 1..20: mol_type = other RNA
gcctgagcatgcaactgaaa

SEQ ID NO: 1793 - RNA, 20 nt, synthetic construct
  misc_feature 1..20: note = synthesized
  source 1..20: mol_type = other RNA
gcctgagcatgcaactgaag

SEQ ID NO: 1794 - RNA, 20 nt, synthetic construct
  misc_feature 1..20: note = synthesized
  source 1..20: mol_type = other RNA
ggacttcagttgcatgctca

SEQ ID NO: 1795 - RNA, 20 nt, synthetic construct
  misc_feature 1..20: note = synthesized
  source 1..20: mol_type = other RNA
ggatttcagttgcatgctca

SEQ ID NO: 1796 - RNA, 20 nt, synthetic construct
  misc_feature 1..20: note = synthesized
  source 1..20: mol_type = other RNA
gggtgaacagacaggacttc

SEQ ID NO: 1797 - RNA, 20 nt, synthetic construct
  misc_feature 1..20: note = synthesized
  source 1..20: mol_type = other RNA
gggtgaacagacaggatttc

SEQ ID NO: 1798 - RNA, 20 nt, synthetic construct
  misc_feature 1..20: note = synthesized
  source 1..20: mol_type = other RNA
ggtgaacagacaggacttca

SEQ ID NO: 1799 - RNA, 20 nt, synthetic construct
  misc_feature 1..20: note = synthesized
  source 1..20: mol_type = other RNA
ggtgaacagacaggatttca

SEQ ID NO: 1800 - RNA, 20 nt, synthetic construct
  misc_feature 1..20: note = synthesized
  source 1..20: mol_type = other RNA
gtgaacagacaggacttcag

SEQ ID NO: 1801 - RNA, 20 nt, synthetic construct
  misc_feature 1..20: note = synthesized
  source 1..20: mol_type = other RNA
gtgaacagacaggatttcag

SEQ ID NO: 1802 - RNA, 20 nt, synthetic construct
  misc_feature 1..20: note = synthesized
  source 1..20: mol_type = other RNA
gtgggtgaacagacaggact

SEQ ID NO: 1803 - RNA, 20 nt, synthetic construct
  misc_feature 1..20: note = synthesized
  source 1..20: mol_type = other RNA
gtgggtgaacagacaggatt

SEQ ID NO: 1804 - RNA, 20 nt, synthetic construct
  misc_feature 1..20: note = synthesized
  source 1..20: mol_type = other RNA
tgaaatcctgtctgttcacc

SEQ ID NO: 1805 - RNA, 20 nt, synthetic construct
  misc_feature 1..20: note = synthesized
  source 1..20: mol_type = other RNA
tgaacagacaggacttcagt

SEQ ID NO: 1806 - RNA, 20 nt, synthetic construct
  misc_feature 1..20: note = synthesized
  source 1..20: mol_type = other RNA
tgaacagacaggatttcagt

SEQ ID NO: 1807 - RNA, 20 nt, synthetic construct
  misc_feature 1..20: note = synthesized
  source 1..20: mol_type = other RNA
tgaagtcctgtctgttcacc

SEQ ID NO: 1808 - RNA, 20 nt, synthetic construct
  misc_feature 1..20: note = synthesized
  source 1..20: mol_type = other RNA
tgagcatgcaactgaaatcc

SEQ ID NO: 1809 - RNA, 20 nt, synthetic construct
  misc_feature 1..20: note = synthesized
  source 1..20: mol_type = other RNA
tgagcatgcaactgaagtcc

SEQ ID NO: 1810 - RNA, 20 nt, synthetic construct
  misc_feature 1..20: note = synthesized
  source 1..20: mol_type = other RNA
tgcaactgaaatcctgtctg

SEQ ID NO: 1811 - RNA, 20 nt, synthetic construct
  misc_feature 1..20: note = synthesized
  source 1..20: mol_type = other RNA
tgcaactgaagtcctgtctg

SEQ ID NO: 1812 - RNA, 20 nt, synthetic construct
  misc_feature 1..20: note = synthesized
  source 1..20: mol_type = other RNA
tgggtgaacagacaggactt

SEQ ID NO: 1813 - RNA, 20 nt, synthetic construct
  misc_feature 1..20: note = synthesized
  source 1..20: mol_type = other RNA
tgggtgaacagacaggattt

SEQ ID NO: 1814 - RNA, 20 nt, synthetic construct
  misc_feature 1..20: note = synthesized
  source 1..20: mol_type = other RNA
tttcagttgcatgctcaggc

SEQ ID NO: 1815 - RNA, 20 nt, synthetic construct
  misc_feature 1..20: note = synthesized
  source 1..20: mol_type = other RNA
aatcaggtcagcctgtgagc

SEQ ID NO: 1816 - RNA, 20 nt, synthetic construct
  misc_feature 1..20: note = synthesized
  source 1..20: mol_type = other RNA
aatcaggtcagcctgtgagt

SEQ ID NO: 1817 - RNA, 20 nt, synthetic construct
  misc_feature 1..20: note = synthesized
  source 1..20: mol_type = other RNA
actcacaggctgacctgatt

SEQ ID NO: 1818 - RNA, 20 nt, synthetic construct
  misc_feature 1..20: note = synthesized
  source 1..20: mol_type = other RNA
agagggactcacaggctgac

SEQ ID NO: 1819 - RNA, 20 nt, synthetic construct
  misc_feature 1..20: note = synthesized
  source 1..20: mol_type = other RNA
agaggggctcacaggctgac

SEQ ID NO: 1820 - RNA, 20 nt, synthetic construct
  misc_feature 1..20: note = synthesized
  source 1..20: mol_type = other RNA
agcccctctagcatcagagg

SEQ ID NO: 1821 - RNA, 20 nt, synthetic construct
  misc_feature 1..20: note = synthesized
  source 1..20: mol_type = other RNA
agcctgtgagcccctctagc

SEQ ID NO: 1822 - RNA, 20 nt, synthetic construct
  misc_feature 1..20: note = synthesized
  source 1..20: mol_type = other RNA
agcctgtgagtccctctagc

SEQ ID NO: 1823 - RNA, 20 nt, synthetic construct
  misc_feature 1..20: note = synthesized
  source 1..20: mol_type = other RNA
agggactcacaggctgacct

SEQ ID NO: 1824 - RNA, 20 nt, synthetic construct
  misc_feature 1..20: note = synthesized
  source 1..20: mol_type = other RNA
aggggctcacaggctgacct

SEQ ID NO: 1825 - RNA, 20 nt, synthetic construct
  misc_feature 1..20: note = synthesized
  source 1..20: mol_type = other RNA
aggtcagcctgtgagcccct

SEQ ID NO: 1826 - RNA, 20 nt, synthetic construct
  misc_feature 1..20: note = synthesized
  source 1..20: mol_type = other RNA
aggtcagcctgtgagtccct

SEQ ID NO: 1827 - RNA, 20 nt, synthetic construct
  misc_feature 1..20: note = synthesized
  source 1..20: mol_type = other RNA
agtccctctagcatcagagg

SEQ ID NO: 1828 - RNA, 20 nt, synthetic construct
  misc_feature 1..20: note = synthesized
  source 1..20: mol_type = other RNA
atcaggtcagcctgtgagcc

SEQ ID NO: 1829 - RNA, 20 nt, synthetic construct
  misc_feature 1..20: note = synthesized
  source 1..20: mol_type = other RNA
atcaggtcagcctgtgagtc

SEQ ID NO: 1830 - RNA, 20 nt, synthetic construct
  misc_feature 1..20: note = synthesized
  source 1..20: mol_type = other RNA
atgctagagggactcacagg

SEQ ID NO: 1831 - RNA, 20 nt, synthetic construct
  misc_feature 1..20: note = synthesized
  source 1..20: mol_type = other RNA
atgctagaggggctcacagg

SEQ ID NO: 1832 - RNA, 20 nt, synthetic construct
  misc_feature 1..20: note = synthesized
  source 1..20: mol_type = other RNA
cagcctgtgagcccctctag

SEQ ID NO: 1833 - RNA, 20 nt, synthetic construct
  misc_feature 1..20: note = synthesized
  source 1..20: mol_type = other RNA
cagcctgtgagtccctctag

SEQ ID NO: 1834 - RNA, 20 nt, synthetic construct
  misc_feature 1..20: note = synthesized
  source 1..20: mol_type = other RNA
ccctctgatgctagagggac

SEQ ID NO: 1835 - RNA, 20 nt, synthetic construct
  misc_feature 1..20: note = synthesized
  source 1..20: mol_type = other RNA
ccctctgatgctagaggggc

SEQ ID NO: 1836 - RNA, 20 nt, synthetic construct
  misc_feature 1..20: note = synthesized
  source 1..20: mol_type = other RNA
cctctgatgctagagggact

SEQ ID NO: 1837 - RNA, 20 nt, synthetic construct
  misc_feature 1..20: note = synthesized
  source 1..20: mol_type = other RNA
cctctgatgctagaggggct

SEQ ID NO: 1838 - RNA, 20 nt, synthetic construct
  misc_feature 1..20: note = synthesized
  source 1..20: mol_type = other RNA
cctgtgagcccctctagcat

SEQ ID NO: 1839 - RNA, 20 nt, synthetic construct
  misc_feature 1..20: note = synthesized
  source 1..20: mol_type = other RNA
cctgtgagtccctctagcat

SEQ ID NO: 1840 - RNA, 20 nt, synthetic construct
  misc_feature 1..20: note = synthesized
  source 1..20: mol_type = other RNA
ctctgatgctagagggactc

SEQ ID NO: 1841 - RNA, 20 nt, synthetic construct
  misc_feature 1..20: note = synthesized
  source 1..20: mol_type = other RNA
ctctgatgctagaggggctc

SEQ ID NO: 1842 - RNA, 20 nt, synthetic construct
  misc_feature 1..20: note = synthesized
  source 1..20: mol_type = other RNA
gcccctctagcatcagaggg

SEQ ID NO: 1843 - RNA, 20 nt, synthetic construct
  misc_feature 1..20: note = synthesized
  source 1..20: mol_type = other RNA
gcctgtgagcccctctagca

SEQ ID NO: 1844 - RNA, 20 nt, synthetic construct
  misc_feature 1..20: note = synthesized
  source 1..20: mol_type = other RNA
gcctgtgagtccctctagca

SEQ ID NO: 1845 - RNA, 20 nt, synthetic construct
  misc_feature 1..20: note = synthesized
  source 1..20: mol_type = other RNA
gctagagggactcacaggct

SEQ ID NO: 1846 - RNA, 20 nt, synthetic construct
  misc_feature 1..20: note = synthesized
  source 1..20: mol_type = other RNA
gctagaggggctcacaggct

SEQ ID NO: 1847 - RNA, 20 nt, synthetic construct
  misc_feature 1..20: note = synthesized
  source 1..20: mol_type = other RNA
gctcacaggctgacctgatt

SEQ ID NO: 1848 - RNA, 20 nt, synthetic construct
  misc_feature 1..20: note = synthesized
  source 1..20: mol_type = other RNA
ggactcacaggctgacctga

SEQ ID NO: 1849 - RNA, 20 nt, synthetic construct
  misc_feature 1..20: note = synthesized
  source 1..20: mol_type = other RNA
gggctcacaggctgacctga

SEQ ID NO: 1850 - RNA, 20 nt, synthetic construct
  misc_feature 1..20: note = synthesized
  source 1..20: mol_type = other RNA
gtcagcctgtgagcccctct

SEQ ID NO: 1851 - RNA, 20 nt, synthetic construct
  misc_feature 1..20: note = synthesized
  source 1..20: mol_type = other RNA
gtcagcctgtgagtccctct

SEQ ID NO: 1852 - RNA, 20 nt, synthetic construct
  misc_feature 1..20: note = synthesized
  source 1..20: mol_type = other RNA
gtccctctagcatcagaggg

SEQ ID NO: 1853 - RNA, 20 nt, synthetic construct
  misc_feature 1..20: note = synthesized
  source 1..20: mol_type = other RNA
tagagggactcacaggctga

SEQ ID NO: 1854 - RNA, 20 nt, synthetic construct
  misc_feature 1..20: note = synthesized
  source 1..20: mol_type = other RNA
tagaggggctcacaggctga

SEQ ID NO: 1855 - RNA, 20 nt, synthetic construct
  misc_feature 1..20: note = synthesized
  source 1..20: mol_type = other RNA
tcagcctgtgagcccctcta

SEQ ID NO: 1856 - RNA, 20 nt, synthetic construct
  misc_feature 1..20: note = synthesized
  source 1..20: mol_type = other RNA
tcagcctgtgagtccctcta

SEQ ID NO: 1857 - RNA, 20 nt, synthetic construct
  misc_feature 1..20: note = synthesized
  source 1..20: mol_type = other RNA
tcaggtcagcctgtgagccc

SEQ ID NO: 1858 - RNA, 20 nt, synthetic construct
  misc_feature 1..20: note = synthesized
  source 1..20: mol_type = other RNA
tcaggtcagcctgtgagtcc

SEQ ID NO: 1859 - RNA, 20 nt, synthetic construct
  misc_feature 1..20: note = synthesized
  source 1..20: mol_type = other RNA
tccctctgatgctagaggga

SEQ ID NO: 1860 - RNA, 20 nt, synthetic construct
  misc_feature 1..20: note = synthesized
  source 1..20: mol_type = other RNA
tccctctgatgctagagggg

SEQ ID NO: 1861 - RNA, 20 nt, synthetic construct
  misc_feature 1..20: note = synthesized
  source 1..20: mol_type = other RNA
tctgatgctagagggactca

SEQ ID NO: 1862 - RNA, 20 nt, synthetic construct
  misc_feature 1..20: note = synthesized
  source 1..20: mol_type = other RNA
tctgatgctagaggggctca

SEQ ID NO: 1863 - RNA, 20 nt, synthetic construct
  misc_feature 1..20: note = synthesized
  source 1..20: mol_type = other RNA
tgatgctagagggactcaca

SEQ ID NO: 1864 - RNA, 20 nt, synthetic construct
  misc_feature 1..20: note = synthesized
  source 1..20: mol_type = other RNA
tgatgctagaggggctcaca

SEQ ID NO: 1865 - RNA, 20 nt, synthetic construct
  misc_feature 1..20: note = synthesized
  source 1..20: mol_type = other RNA
tgtgagcccctctagcatca

SEQ ID NO: 1866 - RNA, 20 nt, synthetic construct
  misc_feature 1..20: note = synthesized
  source 1..20: mol_type = other RNA
tgtgagtccctctagcatca

SEQ ID NO: 1867 - RNA, 20 nt, synthetic construct
  misc_feature 1..20: note = synthesized
  source 1..20: mol_type = other RNA
aaaatgtctagcaaagaacc

SEQ ID NO: 1868 - RNA, 20 nt, synthetic construct
  misc_feature 1..20: note = synthesized
  source 1..20: mol_type = other RNA
aaaatgtttagcaaagaacc

SEQ ID NO: 1869 - RNA, 20 nt, synthetic construct
  misc_feature 1..20: note = synthesized
  source 1..20: mol_type = other RNA
aaacattttgcagggtacct

SEQ ID NO: 1870 - RNA, 20 nt, synthetic construct
  misc_feature 1..20: note = synthesized
  source 1..20: mol_type = other RNA
aaatgtctagcaaagaaccc

SEQ ID NO: 1871 - RNA, 20 nt, synthetic construct
  misc_feature 1..20: note = synthesized
  source 1..20: mol_type = other RNA
aaatgtttagcaaagaaccc

SEQ ID NO: 1872 - RNA, 20 nt, synthetic construct
  misc_feature 1..20: note = synthesized
  source 1..20: mol_type = other RNA
aacattttgcagggtacctg

SEQ ID NO: 1873 - RNA, 20 nt, synthetic construct
  misc_feature 1..20: note = synthesized
  source 1..20: mol_type = other RNA
agacattttgcagggtacct

SEQ ID NO: 1874 - RNA, 20 nt, synthetic construct
  misc_feature 1..20: note = synthesized
  source 1..20: mol_type = other RNA
aggtaccctgcaaaatgtct

SEQ ID NO: 1875 - RNA, 20 nt, synthetic construct
  misc_feature 1..20: note = synthesized
  source 1..20: mol_type = other RNA
aggtaccctgcaaaatgttt

SEQ ID NO: 1876 - RNA, 20 nt, synthetic construct
  misc_feature 1..20: note = synthesized
  source 1..20: mol_type = other RNA
agtcttgggttctttgctaa

SEQ ID NO: 1877 - RNA, 20 nt, synthetic construct
  misc_feature 1..20: note = synthesized
  source 1..20: mol_type = other RNA
agtcttgggttctttgctag

SEQ ID NO: 1878 - RNA, 20 nt, synthetic construct
  misc_feature 1..20: note = synthesized
  source 1..20: mol_type = other RNA
atgtctagcaaagaacccaa

SEQ ID NO: 1879 - RNA, 20 nt, synthetic construct
  misc_feature 1..20: note = synthesized
  source 1..20: mol_type = other RNA
atgtttagcaaagaacccaa

SEQ ID NO: 1880 - RNA, 20 nt, synthetic construct
  misc_feature 1..20: note = synthesized
  source 1..20: mol_type = other RNA
caaaatgtctagcaaagaac

SEQ ID NO: 1881 - RNA, 20 nt, synthetic construct
  misc_feature 1..20: note = synthesized
  source 1..20: mol_type = other RNA
caaaatgtttagcaaagaac

SEQ ID NO: 1882 - RNA, 20 nt, synthetic construct
  misc_feature 1..20: note = synthesized
  source 1..20: mol_type = other RNA
caggtaccctgcaaaatgtc

SEQ ID NO: 1883 - RNA, 20 nt, synthetic construct
  misc_feature 1..20: note = synthesized
  source 1..20: mol_type = other RNA
caggtaccctgcaaaatgtt

SEQ ID NO: 1884 - RNA, 20 nt, synthetic construct
  misc_feature 1..20: note = synthesized
  source 1..20: mol_type = other RNA
cctgcaaaatgtctagcaaa

SEQ ID NO: 1885 - RNA, 20 nt, synthetic construct
  misc_feature 1..20: note = synthesized
  source 1..20: mol_type = other RNA
cctgcaaaatgtttagcaaa

SEQ ID NO: 1886 - RNA, 20 nt, synthetic construct
  misc_feature 1..20: note = synthesized
  source 1..20: mol_type = other RNA
ctaaacattttgcagggtac

SEQ ID NO: 1887 - RNA, 20 nt, synthetic construct
  misc_feature 1..20: note = synthesized
  source 1..20: mol_type = other RNA
ctagacattttgcagggtac

SEQ ID NO: 1888 - RNA, 20 nt, synthetic construct
  misc_feature 1..20: note = synthesized
  source 1..20: mol_type = other RNA
ctagcaaagaacccaagact

SEQ ID NO: 1889 - RNA, 20 nt, synthetic construct
  misc_feature 1..20: note = synthesized
  source 1..20: mol_type = other RNA
ctgcaaaatgtctagcaaag

SEQ ID NO: 1890 - RNA, 20 nt, synthetic construct
  misc_feature 1..20: note = synthesized
  source 1..20: mol_type = other RNA
ctgcaaaatgtttagcaaag

SEQ ID NO: 1891 - RNA, 20 nt, synthetic construct
  misc_feature 1..20: note = synthesized
  source 1..20: mol_type = other RNA
cttgggttctttgctaaaca

SEQ ID NO: 1892 - RNA, 20 nt, synthetic construct
  misc_feature 1..20: note = synthesized
  source 1..20: mol_type = other RNA
cttgggttctttgctagaca

SEQ ID NO: 1893 - RNA, 20 nt, synthetic construct
  misc_feature 1..20: note = synthesized
  source 1..20: mol_type = other RNA
ctttgctaaacattttgcag

SEQ ID NO: 1894 - RNA, 20 nt, synthetic construct
  misc_feature 1..20: note = synthesized
  source 1..20: mol_type = other RNA
ctttgctagacattttgcag

SEQ ID NO: 1895 - RNA, 20 nt, synthetic construct
  misc_feature 1..20: note = synthesized
  source 1..20: mol_type = other RNA
gacattttgcagggtacctg

SEQ ID NO: 1896 - RNA, 20 nt, synthetic construct
  misc_feature 1..20: note = synthesized
  source 1..20: mol_type = other RNA
gcaaaatgtctagcaaagaa

SEQ ID NO: 1897 - RNA, 20 nt, synthetic construct
  misc_feature 1..20: note = synthesized
  source 1..20: mol_type = other RNA
gcaaaatgtttagcaaagaa

SEQ ID NO: 1898 - RNA, 20 nt, synthetic construct
  misc_feature 1..20: note = synthesized
  source 1..20: mol_type = other RNA
gctaaacattttgcagggta

SEQ ID NO: 1899 - RNA, 20 nt, synthetic construct
  misc_feature 1..20: note = synthesized
  source 1..20: mol_type = other RNA
gctagacattttgcagggta

SEQ ID NO: 1900 - RNA, 20 nt, synthetic construct
  misc_feature 1..20: note = synthesized
  source 1..20: mol_type = other RNA
gggttctttgctaaacattt

SEQ ID NO: 1901 - RNA, 20 nt, synthetic construct
  misc_feature 1..20: note = synthesized
  source 1..20: mol_type = other RNA
gggttctttgctagacattt

SEQ ID NO: 1902 - RNA, 20 nt, synthetic construct
  misc_feature 1..20: note = synthesized
  source 1..20: mol_type = other RNA
ggtaccctgcaaaatgtcta

SEQ ID NO: 1903 - RNA, 20 nt, synthetic construct
  misc_feature 1..20: note = synthesized
  source 1..20: mol_type = other RNA
ggtaccctgcaaaatgttta

SEQ ID NO: 1904 - RNA, 20 nt, synthetic construct
  misc_feature 1..20: note = synthesized
  source 1..20: mol_type = other RNA
ggttctttgctaaacatttt

SEQ ID NO: 1905 - RNA, 20 nt, synthetic construct
  misc_feature 1..20: note = synthesized
  source 1..20: mol_type = other RNA
ggttctttgctagacatttt

SEQ ID NO: 1906 - RNA, 20 nt, synthetic construct
  misc_feature 1..20: note = synthesized
  source 1..20: mol_type = other RNA
gtaccctgcaaaatgtctag

SEQ ID NO: 1907 - RNA, 20 nt, synthetic construct
  misc_feature 1..20: note = synthesized
  source 1..20: mol_type = other RNA
gtaccctgcaaaatgtttag

SEQ ID NO: 1908 - RNA, 20 nt, synthetic construct
  misc_feature 1..20: note = synthesized
  source 1..20: mol_type = other RNA
gtcttgggttctttgctaaa

SEQ ID NO: 1909 - RNA, 20 nt, synthetic construct
  misc_feature 1..20: note = synthesized
  source 1..20: mol_type = other RNA
gtcttgggttctttgctaga

SEQ ID NO: 1910 - RNA, 20 nt, synthetic construct
  misc_feature 1..20: note = synthesized
  source 1..20: mol_type = other RNA
taccctgcaaaatgtctagc

SEQ ID NO: 1911 - RNA, 20 nt, synthetic construct
  misc_feature 1..20: note = synthesized
  source 1..20: mol_type = other RNA
taccctgcaaaatgtttagc

SEQ ID NO: 1912 - RNA, 20 nt, synthetic construct
  misc_feature 1..20: note = synthesized
  source 1..20: mol_type = other RNA
tctagcaaagaacccaagac

SEQ ID NO: 1913 - RNA, 20 nt, synthetic construct
  misc_feature 1..20: note = synthesized
  source 1..20: mol_type = other RNA
tcttgggttctttgctaaac

SEQ ID NO: 1914 - RNA, 20 nt, synthetic construct
  misc_feature 1..20: note = synthesized
  source 1..20: mol_type = other RNA
tcttgggttctttgctagac

SEQ ID NO: 1915 - RNA, 20 nt, synthetic construct
  misc_feature 1..20: note = synthesized
  source 1..20: mol_type = other RNA
tgcaaaatgtctagcaaaga

SEQ ID NO: 1916 - RNA, 20 nt, synthetic construct
  misc_feature 1..20: note = synthesized
  source 1..20: mol_type = other RNA
tgcaaaatgtttagcaaaga

SEQ ID NO: 1917 - RNA, 20 nt, synthetic construct
  misc_feature 1..20: note = synthesized
  source 1..20: mol_type = other RNA
tgggttctttgctaaacatt

SEQ ID NO: 1918 - RNA, 20 nt, synthetic construct
  misc_feature 1..20: note = synthesized
  source 1..20: mol_type = other RNA
tgggttctttgctagacatt

SEQ ID NO: 1919 - RNA, 20 nt, synthetic construct
  misc_feature 1..20: note = synthesized
  source 1..20: mol_type = other RNA
tgtctagcaaagaacccaag

SEQ ID NO: 1920 - RNA, 20 nt, synthetic construct
  misc_feature 1..20: note = synthesized
  source 1..20: mol_type = other RNA
tgtttagcaaagaacccaag

SEQ ID NO: 1921 - RNA, 20 nt, synthetic construct
  misc_feature 1..20: note = synthesized
  source 1..20: mol_type = other RNA
ttagcaaagaacccaagact

SEQ ID NO: 1922 - RNA, 20 nt, synthetic construct
  misc_feature 1..20: note = synthesized
  source 1..20: mol_type = other RNA
ttgctaaacattttgcaggg

SEQ ID NO: 1923 - RNA, 20 nt, synthetic construct
  misc_feature 1..20: note = synthesized
  source 1..20: mol_type = other RNA
ttgctagacattttgcaggg

SEQ ID NO: 1924 - RNA, 20 nt, synthetic construct
  misc_feature 1..20: note = synthesized
  source 1..20: mol_type = other RNA
ttgggttctttgctaaacat

SEQ ID NO: 1925 - RNA, 20 nt, synthetic construct
  misc_feature 1..20: note = synthesized
  source 1..20: mol_type = other RNA
ttgggttctttgctagacat

SEQ ID NO: 1926 - RNA, 20 nt, synthetic construct
  misc_feature 1..20: note = synthesized
  source 1..20: mol_type = other RNA
tttagcaaagaacccaagac

SEQ ID NO: 1927 - RNA, 20 nt, synthetic construct
  misc_feature 1..20: note = synthesized
  source 1..20: mol_type = other RNA
tttgctaaacattttgcagg

SEQ ID NO: 1928 - RNA, 20 nt, synthetic construct
  misc_feature 1..20: note = synthesized
  source 1..20: mol_type = other RNA
tttgctagacattttgcagg

SEQ ID NO: 1929 - RNA, 20 nt, synthetic construct
  misc_feature 1..20: note = synthesized
  source 1..20: mol_type = other RNA
aaagggtaggaagaaatggg

SEQ ID NO: 1930 - RNA, 20 nt, synthetic construct
  misc_feature 1..20: note = synthesized
  source 1..20: mol_type = other RNA
aacttatctggaagagaaag

SEQ ID NO: 1931 - RNA, 20 nt, synthetic construct
  misc_feature 1..20: note = synthesized
  source 1..20: mol_type = other RNA
aacttatctggaagagatag

SEQ ID NO: 1932 - RNA, 20 nt, synthetic construct
  misc_feature 1..20: note = synthesized
  source 1..20: mol_type = other RNA
aagagaaagggtaggaagaa

SEQ ID NO: 1933 - RNA, 20 nt, synthetic construct
  misc_feature 1..20: note = synthesized
  source 1..20: mol_type = other RNA
aagagatagggtaggaagaa

SEQ ID NO: 1934 - RNA, 20 nt, synthetic construct
  misc_feature 1..20: note = synthesized
  source 1..20: mol_type = other RNA
aagggtaggaagaaatgggg

SEQ ID NO: 1935 - RNA, 20 nt, synthetic construct
  misc_feature 1..20: note = synthesized
  source 1..20: mol_type = other RNA
accctatctcttccagataa

SEQ ID NO: 1936 - RNA, 20 nt, synthetic construct
  misc_feature 1..20: note = synthesized
  source 1..20: mol_type = other RNA
accctttctcttccagataa

SEQ ID NO: 1937 - RNA, 20 nt, synthetic construct
  misc_feature 1..20: note = synthesized
  source 1..20: mol_type = other RNA
acttatctggaagagaaagg

SEQ ID NO: 1938 - RNA, 20 nt, synthetic construct
  misc_feature 1..20: note = synthesized
  source 1..20: mol_type = other RNA
acttatctggaagagatagg

SEQ ID NO: 1939 - RNA, 20 nt, synthetic construct
  misc_feature 1..20: note = synthesized
  source 1..20: mol_type = other RNA
atagggtaggaagaaatggg

SEQ ID NO: 1940 - RNA, 20 nt, synthetic construct
  misc_feature 1..20: note = synthesized
  source 1..20: mol_type = other RNA
atctcttccagataagttgg

SEQ ID NO: 1941 - RNA, 20 nt, synthetic construct
  misc_feature 1..20: note = synthesized
  source 1..20: mol_type = other RNA
atctggaagagaaagggtag

SEQ ID NO: 1942 - RNA, 20 nt, synthetic construct
  misc_feature 1..20: note = synthesized
  source 1..20: mol_type = other RNA
atctggaagagatagggtag

SEQ ID NO: 1943 - RNA, 20 nt, synthetic construct
  misc_feature 1..20: note = synthesized
  source 1..20: mol_type = other RNA
atttcttcctaccctatctc

SEQ ID NO: 1944 - RNA, 20 nt, synthetic construct
  misc_feature 1..20: note = synthesized
  source 1..20: mol_type = other RNA
atttcttcctaccctttctc

SEQ ID NO: 1945 - RNA, 20 nt, synthetic construct
  misc_feature 1..20: note = synthesized
  source 1..20: mol_type = other RNA
catttcttcctaccctatct

SEQ ID NO: 1946 - RNA, 20 nt, synthetic construct
  misc_feature 1..20: note = synthesized
  source 1..20: mol_type = other RNA
catttcttcctaccctttct

SEQ ID NO: 1947 - RNA, 20 nt, synthetic construct
  misc_feature 1..20: note = synthesized
  source 1..20: mol_type = other RNA
ccatttcttcctaccctatc

SEQ ID NO: 1948 - RNA, 20 nt, synthetic construct
  misc_feature 1..20: note = synthesized
  source 1..20: mol_type = other RNA
ccatttcttcctaccctttc

SEQ ID NO: 1949 - RNA, 20 nt, synthetic construct
  misc_feature 1..20: note = synthesized
  source 1..20: mol_type = other RNA
cccatttcttcctaccctat

SEQ ID NO: 1950 - RNA, 20 nt, synthetic construct
  misc_feature 1..20: note = synthesized
  source 1..20: mol_type = other RNA
cccatttcttcctacccttt

SEQ ID NO: 1951 - RNA, 20 nt, synthetic construct
  misc_feature 1..20: note = synthesized
  source 1..20: mol_type = other RNA
ccccatttcttcctacccta

SEQ ID NO: 1952 - RNA, 20 nt, synthetic construct
  misc_feature 1..20: note = synthesized
  source 1..20: mol_type = other RNA
ccccatttcttcctaccctt

SEQ ID NO: 1953 - RNA, 20 nt, synthetic construct
  misc_feature 1..20: note = synthesized
  source 1..20: mol_type = other RNA
ccctatctcttccagataag

SEQ ID NO: 1954 - RNA, 20 nt, synthetic construct
  misc_feature 1..20: note = synthesized
  source 1..20: mol_type = other RNA
ccctttctcttccagataag

SEQ ID NO: 1955 - RNA, 20 nt, synthetic construct
  misc_feature 1..20: note = synthesized
  source 1..20: mol_type = other RNA
cctaccctatctcttccaga

SEQ ID NO: 1956 - RNA, 20 nt, synthetic construct
  misc_feature 1..20: note = synthesized
  source 1..20: mol_type = other RNA
cctaccctttctcttccaga

SEQ ID NO: 1957 - RNA, 20 nt, synthetic construct
  misc_feature 1..20: note = synthesized
  source 1..20: mol_type = other RNA
ctaccctatctcttccagat

SEQ ID NO: 1958 - RNA, 20 nt, synthetic construct
  misc_feature 1..20: note = synthesized
  source 1..20: mol_type = other RNA
ctaccctttctcttccagat

SEQ ID NO: 1959 - RNA, 20 nt, synthetic construct
  misc_feature 1..20: note = synthesized
  source 1..20: mol_type = other RNA
ctatctcttccagataagtt

SEQ ID NO: 1960 - RNA, 20 nt, synthetic construct
  misc_feature 1..20: note = synthesized
  source 1..20: mol_type = other RNA
cttatctggaagagaaaggg

SEQ ID NO: 1961 - RNA, 20 nt, synthetic construct
  misc_feature 1..20: note = synthesized
  source 1..20: mol_type = other RNA
cttatctggaagagataggg

SEQ ID NO: 1962 - RNA, 20 nt, synthetic construct
  misc_feature 1..20: note = synthesized
  source 1..20: mol_type = other RNA
ctttctcttccagataagtt

SEQ ID NO: 1963 - RNA, 20 nt, synthetic construct
  misc_feature 1..20: note = synthesized
  source 1..20: mol_type = other RNA
gaagagaaagggtaggaaga

SEQ ID NO: 1964 - RNA, 20 nt, synthetic construct
  misc_feature 1..20: note = synthesized
  source 1..20: mol_type = other RNA
gaagagatagggtaggaaga

SEQ ID NO: 1965 - RNA, 20 nt, synthetic construct
  misc_feature 1..20: note = synthesized
  source 1..20: mol_type = other RNA
ggaagagaaagggtaggaag

SEQ ID NO: 1966 - RNA, 20 nt, synthetic construct
  misc_feature 1..20: note = synthesized
  source 1..20: mol_type = other RNA
ggaagagatagggtaggaag

SEQ ID NO: 1967 - RNA, 20 nt, synthetic construct
  misc_feature 1..20: note = synthesized
  source 1..20: mol_type = other RNA
taccctatctcttccagata

SEQ ID NO: 1968 - RNA, 20 nt, synthetic construct
  misc_feature 1..20: note = synthesized
  source 1..20: mol_type = other RNA
taccctttctcttccagata

SEQ ID NO: 1969 - RNA, 20 nt, synthetic construct
  misc_feature 1..20: note = synthesized
  source 1..20: mol_type = other RNA
tagggtaggaagaaatgggg

SEQ ID NO: 1970 - RNA, 20 nt, synthetic construct
  misc_feature 1..20: note = synthesized
  source 1..20: mol_type = other RNA
tatctcttccagataagttg

SEQ ID NO: 1971 - RNA, 20 nt, synthetic construct
  misc_feature 1..20: note = synthesized
  source 1..20: mol_type = other RNA
tcctaccctatctcttccag

SEQ ID NO: 1972 - RNA, 20 nt, synthetic construct
  misc_feature 1..20: note = synthesized
  source 1..20: mol_type = other RNA
tcctaccctttctcttccag

SEQ ID NO: 1973 - RNA, 20 nt, synthetic construct
  misc_feature 1..20: note = synthesized
  source 1..20: mol_type = other RNA
tctggaagagaaagggtagg

SEQ ID NO: 1974 - RNA, 20 nt, synthetic construct
  misc_feature 1..20: note = synthesized
  source 1..20: mol_type = other RNA
tctggaagagatagggtagg

SEQ ID NO: 1975 - RNA, 20 nt, synthetic construct
  misc_feature 1..20: note = synthesized
  source 1..20: mol_type = other RNA
tcttcctaccctatctcttc

SEQ ID NO: 1976 - RNA, 20 nt, synthetic construct
  misc_feature 1..20: note = synthesized
  source 1..20: mol_type = other RNA
tcttcctaccctttctcttc

SEQ ID NO: 1977 - RNA, 20 nt, synthetic construct
  misc_feature 1..20: note = synthesized
  source 1..20: mol_type = other RNA
tggaagagaaagggtaggaa

SEQ ID NO: 1978 - RNA, 20 nt, synthetic construct
  misc_feature 1..20: note = synthesized
  source 1..20: mol_type = other RNA
tggaagagatagggtaggaa

SEQ ID NO: 1979 - RNA, 20 nt, synthetic construct
  misc_feature 1..20: note = synthesized
  source 1..20: mol_type = other RNA
ttcctaccctatctcttcca

SEQ ID NO: 1980 - RNA, 20 nt, synthetic construct
  misc_feature 1..20: note = synthesized
  source 1..20: mol_type = other RNA
ttcctaccctttctcttcca

SEQ ID NO: 1981 - RNA, 20 nt, synthetic construct
  misc_feature 1..20: note = synthesized
  source 1..20: mol_type = other RNA
ttctcttccagataagttgg

SEQ ID NO: 1982 - RNA, 20 nt, synthetic construct
  misc_feature 1..20: note = synthesized
  source 1..20: mol_type = other RNA
tttctcttccagataagttg

SEQ ID NO: 1983 - RNA, 20 nt, synthetic construct
  misc_feature 1..20: note = synthesized
  source 1..20: mol_type = other RNA
tttcttcctaccctatctct

SEQ ID NO: 1984 - RNA, 20 nt, synthetic construct
  misc_feature 1..20: note = synthesized
  source 1..20: mol_type = other RNA
tttcttcctaccctttctct

SEQ ID NO: 1985 - RNA, 20 nt, synthetic construct
  misc_feature 1..20: note = synthesized
  source 1..20: mol_type = other RNA
ttccactgagggtgctcgat

SEQ ID NO: 1986 - RNA, 20 nt, synthetic construct
  misc_feature 1..20: note = synthesized
  source 1..20: mol_type = other RNA
tgcctatcgagcaccctcag

SEQ ID NO: 1987 - RNA, 20 nt, synthetic construct
  misc_feature 1..20: note = synthesized
  source 1..20: mol_type = other RNA
aaggaaatgcaaggggccat

SEQ ID NO: 1988 - RNA, 20 nt, synthetic construct
  misc_feature 1..20: note = synthesized
  source 1..20: mol_type = other RNA
agtcatggctctgtactgtt

SEQ ID NO: 1989 - RNA, 20 nt, synthetic construct
  misc_feature 1..20: note = synthesized
  source 1..20: mol_type = other RNA
ttaacttagtctagggggac

SEQ ID NO: 1990 - RNA, 20 nt, synthetic construct
  misc_feature 1..20: note = synthesized
  source 1..20: mol_type = other RNA
cgtgtaacagagagttaaga

SEQ ID NO: 1991 - DNA, 22 bp, synthetic construct
  misc_feature 1..22: note = synthesized
  source 1..22: mol_type = other DNA
tgatgctctgattgagggttcc

SEQ ID NO: 1992 - DNA, 20 bp, synthetic construct
  misc_feature 1..20: note = synthesized
  source 1..20: mol_type = other DNA
aggtgctgaactgcatgttg

SEQ ID NO: 1993 - DNA, 20 bp, synthetic construct
  misc_feature 1..20: note = synthesized
  source 1..20: mol_type = other DNA
acatgccgcagatgagaatg

SEQ ID NO: 1994 - DNA, 21 bp, synthetic construct
  misc_feature 1..21: note = synthesized
  source 1..21: mol_type = other DNA
tttccgtctctgatccggttc

SEQ ID NO: 1995 - DNA, 22 bp, synthetic construct
  misc_feature 1..22: note = synthesized
  source 1..22: mol_type = other DNA
cacacacatgcacttacctgtg

SEQ ID NO: 1996 - DNA, 19 bp, synthetic construct
  misc_feature 1..19: note = synthesized
  source 1..19: mol_type = other DNA
atttgccaagttgccgtcc
